(19) United States
(12) Patent Application Publication
(10) Pub. No.: US 2025/0290072 A1
(43) Pub. Date: Sep. 18, 2025

(54) MODULATION OF SYNGAP1 GENE TRANSCRIPTION USING ANTISENSE OLIGONUCLEOTIDES TARGETING REGULATORY RNAS

(71) Applicant: CAMP4 Therapeutics Corporation, Cambridge, MA (US)

(72) Inventors: Ali Al Abdullatif, Somerville, MA (US); Alfica Sehgal, Belmont, MA (US); Gokul Ramaswami, New York, NY (US); Preeti Kashinath Sathe, Cambridge, MA (US); Yeliz Yuva-Aydemir, Grafton, MA (US); David A. Bumcrot, Belmont, MA (US)

(21) Appl. No.: 19/222,816

(22) Filed: May 29, 2025

Related U.S. Application Data
(63) Continuation of application No. PCT/US2023/082182, filed on Dec. 1, 2023.
(60) Provisional application No. 63/385,695, filed on Dec. 1, 2022.

(51) Int. Cl. C12N 15/113

(52) U.S. Cl. CPC C12N 15/113; C12N 2310/11; C12N 2310/315; C12N 2310/321; C12N 2310/3231; C12N 2310/3341

(57) ABSTRACT

Described herein are methods of modulating SYNGAP1 gene transcription using antisense oligonucleotides (ASOs) targeting regulatory RNAs, such as promoter-associated RNAs, enhancer RNAs, and natural antisense transcripts (NATs). These methods are useful for increasing expression of SYNGAP1 mRNA and protein, thereby treating diseases associated with SYNGAP1 mutations.

### CROSS REFERENCE TO RELATED APPLICATIONS

[0001] This application is a continuation of International Application No. PCT/US2023/082182, filed on Dec. 1, 2023, which claims the benefit of U.S. Provisional Application No. 63/385,695, filed Dec. 1, 2022, each of which are hereby incorporated in their entirety by reference.

### SEQUENCE LISTING

[0002] The instant application contains a Sequence Listing which is hereby incorporated by reference in its entirety. Said XML copy, created on Jan. 11, 2024, is named CTC-032WO_SL.xml, and is 7,070,103 bytes in size.

### BACKGROUND

[0003] Transcription factors bind specific sequences in promoter and enhancer DNA elements to regulate gene transcription. It was recently reported that active promoters and enhancer elements are themselves transcribed, generating noncoding regulatory RNAs (regRNAs) such as promoter-associated RNAs (paRNAs) and enhancer RNAs (eRNAs) (see Sartorelli and Lauberth, Nat. Struct. Mol. Biol. (2020) 27: 521-28). Unlike coding RNAs, regRNAs are transcribed bi-directionally. Various models have been proposed for the functions of regRNAs, including nucleosome remodeling (see Mousavi et al., Mol. Cell (2013) 51(5):606-17), modulation of enhancer-promoter looping (see Lai et al., Nature (2013) 494(7438):497-501), and direct interaction with transcription regulators (see Sigova et al., Science (2015) 350, 978-81).

[0004] Approximately 1-2% of all cases of intellectual disabilities are due to mutations in the SYNGAP1 gene. SYNGAP1-related intellectual disability (SYNGAP1-ID) is a neurological disorder characterized by moderate to severe impaired intellectual development with delayed psychomotor development. Mental retardation, autosomal dominant 5 (MRD5), also known as intellectual disability autosomal; dominant 5, is a SYNGAP1-ID that is caused by an autosomal recessive mutation in the SYNGAP1 gene. SYNGAP1-related non-syndromic intellectual disability (NSID) is a result of a heterozygous pathogenic mutation in SYNGAP1 (approximately 89% of cases) or a deletion of 6p21.3 (approximately 11% of cases). SYNGAP1-related NSID presents as moderate to severe cognitive impairment, mild hypotonia, global developmental delay, delayed language development, disordered sleep, oral dyspraxia, inattention, impulsivity, physical aggression, mood swings, sullenness, and rigidity. In addition, 94-98% of cases of MRD5 and SYNGAP1-related NSID also present with epilepsy. There is no cure or treatment for MRD5 or SYNGAP1-related NSID. Patient treatment is limited to treatment of epilepsy and behavioral management. Thus, additional therapeutics are needed.

[0005] Gene expression has been generally known as an undruggable biological process. Despite on-going efforts into understanding the biology of gene transcription and regRNAs, clinically suitable methods of modulating gene expression are limited. There remains a need for new and useful methods for treating diseases associated with aberrant gene expression.

### SUMMARY

[0006] In one aspect, provided herein are antisense oligonucleotides (ASO) complementary to at least 8 contiguous nucleotides of a regulatory RNA of human SYNGAP1, wherein the regulatory RNA has a nucleotide sequence selected from the group consisting of SEQ ID NOs: 1-7.

[0007] In another aspect, provided herein are antisense oligonucleotides (ASO) complementary to at least 8 contiguous nucleotides of a regulatory RNA of human SYNGAP1, wherein the regulatory RNA has a nucleotide sequence selected from the group consisting of SEQ ID NOs: 4, 5, or 6.

[0008] In some embodiments, the ASO is complementary to a sequence in the regRNA that is no more than 200 nucleotides from the 3′ end of the regRNA.

[0009] In some embodiments, the ASO is complementary to a sequence in the regRNA that is no more than 200 nucleotides from the 5′ end of the regRNA.

[0010] In some embodiments, the regRNA is not a polyadenylated RNA.

[0011] In some embodiments, the regulatory RNA has a nucleotide sequence of SEQ ID NO: 1, and the ASO comprises a nucleotide sequence selected from the group consisting of SEQ ID NOs: 10-59, 220-250, 261-267, 272-278, 526-528, 542-591, 702-728, 729-735-741, 988-990, and 1004-2961.

[0012] In some embodiments, the regulatory RNA has a nucleotide sequence of SEQ ID NO: 2, and the ASO comprises a nucleotide sequence selected from the group consisting of SEQ ID NOs: 60-73.

[0013] In some embodiments, the regulatory RNA has a nucleotide sequence of SEQ ID NO: 3, and the ASO comprises a nucleotide sequence selected from the group consisting of SEQ ID NOs: 74-109, 251-260, 268-271, and 279.

[0014] In some embodiments, the regulatory RNA has a nucleotide sequence of SEQ ID NO: 4 or 6, and the ASO comprises a nucleotide sequence selected from the group consisting of SEQ ID NOs: 110-219, 280-525, 529-541, 592-701, 742-891, 906-987, 991-1003, and 2962-4852.

[0015] In some embodiments, the regulatory RNA has a nucleotide sequence of SEQ ID NO: 5, and the ASO comprises a nucleotide sequence selected from the group consisting of SEQ ID NOs: 14-59, 220-250, 261-267, 272-278, 526-528, 542-591, 702-728, 729-735-741, 988-990, and 1007-2961.

[0016] In some embodiments, the ASO comprises the nucleotide sequence of at least 8 contiguous nucleotides of chr6:33419695-33419939.

[0017] In some embodiments, the ASO comprises the nucleotide sequence of at least 8 contiguous nucleotides of chr6:33453987-33454269.

[0018] In some embodiments, the ASO comprises the nucleotide sequence of at least 8 contiguous nucleotides of chr6:33419674-33419940.

[0019] In some embodiments, the ASO is no more than 50, 40, 30, 25, 20, 18, or 16 nucleotides in length.

[0020] In some embodiments, the ASO comprises a RNA polynucleotide comprising one or more chemical modifications.

[0021] In some embodiments, at least 3, 4, or 5 nucleotides at the 5′ end and at least 3, 4, or 5 nucleotides at the 3′ end of the ASO comprise ribonucleotides with one or more chemical modifications.

[0022] In some embodiments, the one or more chemical modifications comprise a nucleotide sugar modification comprising one or more of 2′-O—C₁₋₄alkyl such as 2′-O-methyl (2′-OMe), 2′-deoxy (2′-H), 2′-OC₁₋₃alkyl-O—C₁₋₃alkyl such as 2′-methoxyethyl (“2′-MOE”), 2′-fluoro (“2′-F”), 2′-amino (“2′-NH2”), 2′-arabinosyl (“2′-arabino”) nucleotide, 2′-F-arabinosyl (“2′-F-arabino”) nucleotide, 2′-locked nucleic acid (“LNA”) nucleotide, 2′-amido bridge nucleic acid (AmNA), 2′-unlocked nucleic acid (“ULNA”) nucleotide, a sugar in L form (“L-sugar”), 4′-thioribosyl nucleotide, constrained ethyl (cET), 2′-fluoro-arabino (FANA), or thiomorpholino.

[0023] In some embodiments, the one or more chemical modifications comprise an internucleotide linkage modification comprising one or more of phosphorothioate (“PS” or (P(S))), phosphoramidate (P(NR₁R₂) such as dimethylaminophosphoramidate (P(N(CH₃)₂)), phosphonocarboxylate (P(CH₂)ₙCOOR) such as phosphonoacetate “PACE” (P(CH₂COO⁻)), thiophosphonocarboxylate ((S)P(CH₂)ₙCOOR) such as thiophosphonoacetate “thioPACE” ((S)P(CH₂COO⁻)), alkylphosphonate (P(C₁₋₃alkyl) such as methylphosphonate —P(CH₃), boranophosphonate (P(BH₃)), or phosphorodithioate (P(S)₂).

[0024] In some embodiments, the one or more chemical modifications comprise a nucleobase modification comprising one or more of 2-thiouracil (“2-thioU”), 2-thiocytosine (“2-thioC”), 4-thiouracil (“4-thioU”), 6-thioguanine (“6-thioG”), 2-aminoadenine (“2-aminoA”), 2-aminopurine, pseudouracil, hypoxanthine, 7-deazaguanine, 7-deaza-8-azaguanine, 7-deazaadenine, 7-deaza-8-azaadenine, 5-methylcytosine (“5-methylC”), 5-methyluracil (“5-methylU”), 5-hydroxymethylcytosine, 5-hydroxymethyluracil, 5,6-dehydrouracil, 5-propynylcytosine, 5-propynyluracil, 5-ethynylcytosine, 5-ethynyluracil, 5-allyluracil (“5-allylU”), 5-allylcytosine (“5-allylC”), 5-aminoallyluracil (“5-aminoallylU”), 5-aminoallyl-cytosine (“5-aminoallylC”), an abasic nucleotide, Z base, P base, Unstructured Nucleic Acid (“UNA”), isoguanine (“isoG”), isocytosine (“isoC”) a glycerol nucleic acid (GNA), glycerol nucleic acid (GNA), or thiophosphoramidate morpholinos (TMOs).

[0025] In some embodiments, the one or more chemical modifications comprise 2′-O-methoxyethyl, 5-methyl on cytidine, locked nucleic acid (LNA), phosphodiester (PO) internucleotide bond, or phosphorothioate (PS) internucleotide bond.

[0026] In some embodiments, the ASO further comprises a GalNAc moiety, optionally a GalNAc3 moiety.

[0027] In some embodiments, the ASO does not comprise 10 or more contiguous nucleotides of unmodified DNA.

[0028] In some embodiments, the ASO does not comprise a deoxyribonucleotide.

[0029] In some embodiments, the ASO does not comprise an unmodified ribonucleotide.

[0030] In some embodiments, the length of the ASO is 5×n+5 nucleotides (n is an integer of 3 or greater), wherein the nucleotides at positions 5×m are ribonucleotides modified by LNA (m is an integer from 1 to n) and the nucleotides at the remaining positions are ribonucleotides modified by 2′-O-methoxyethyl.

[0031] In some embodiments, the length of the ASO is 3×n+2 nucleotides (n is an integer of 6 or greater), wherein the nucleotides at positions 3×m are ribonucleotides modified by LNA (m is an integer from 1 to n) and the nucleotides at the remaining positions are ribonucleotides modified by 2′-O-methoxyethyl.

[0032] In some embodiments, each ribonucleotide of the ASO is modified by 2′-O-methoxyethyl.

[0033] In some embodiments, each nucleotide of the ASO is a ribonucleotide modified by 2′-O-methoxyethyl.

[0034] In some embodiments, the ASO comprises 10 or more contiguous nucleotides of unmodified DNA flanked by at least 3 nucleotides of modified ribonucleotides at each of the 5′ end and the 3′ end.

[0035] In some embodiments, each cytidine in the ASO is modified by 5-methyl.

[0036] In some embodiments, the regRNA is a Natural Antisense Transcript (NAT).

[0037] In some embodiments, the regRNA is a paRNA.

[0038] In another aspect, provided herein are pharmaceutical compositions comprising an ASO disclosed herein and a pharmaceutically acceptable carrier or excipient carrier.

[0039] In another aspect, provided herein are methods of increasing transcription of SYNGAP1 in a human cell, the method comprising contacting the cell with an ASO disclosed herein or a pharmaceutical composition disclosed herein.

[0040] In some embodiments, the cell is a neuron.

[0041] In some embodiments, the ASO increases the amount of the regulatory RNA in the cell.

[0042] In some embodiments, the ASO increases the stability of the regulatory RNA in the cell.

[0043] In some embodiments, the method results in increased SYNGAP1 mRNA in the cell.

[0044] In some embodiments, the method results in increased SYNGAP1 protein in the cell.

[0045] In one aspect, provided herein are methods of treating a disease or disorder, the method comprising administering to a subject in need thereof an effective amount of an ASO disclosed herein or a pharmaceutical composition disclosed herein.

[0046] In some embodiments, the disease or disorder is a SYNGAP1-related disease or disorder.

[0047] In some embodiments, the SYNGAP1-related disorder is SYNGAP1-related intellectual disability (ID), mental retardation, autosomal dominant 5 (MRD5), or SYNGAP1-related non-syndromic intellectual disability (NSID).

[0048] In some embodiments, the disease or disorder is a central nervous system (CNS) disorder or a peripheral nervous system (PNS) disorder.

[0049] In some embodiments, the disease or disorder is an affective disorder (e.g., depression), schizophrenia, Alzheimer's disease, Parkinson's disease, Huntington's disease, an autism spectrum disorder (ASD), (e.g., Asperger's syndrome, autistic disorder, Pervasive Developmental Disorder-Not Otherwise Specified (PDD-NOS)), or a CNS or PNS trauma (e.g., brain or spinal cord ischemia or trauma, stroke, or a neurological deficit associated with surgery or anesthesia).

[0050] In some embodiments, administration of the ASO modulates SYNGAP1 gene expression in the subject (e.g., in a cell or tissue of the subject) relative to a pre-administration baseline level.

[0051] In some embodiments, the ASO increases the amount of the regulatory RNA in a cell of the subject.

[0052] In some embodiments, the ASO increases the stability of the regulatory RNA in a cell of the subject.

[0053] In some embodiments, administration of the ASO increases SYNGAP1 gene expression in a cell of the subject relative to a pre-administration baseline level.

[0054] In some embodiments, the cell is a neuron.

### BRIEF DESCRIPTION OF THE DRAWINGS

[0055] FIG. 1A shows an illustrative schematic of eRNA, paRNA, mRNA, and natural antisense transcript (NAT) of a gene on the chromosome. The eRNA, paRNA, and NAT are all non-coding RNAs. The eRNA is transcribed bidirectionally from an enhancer of the gene. The paRNA is transcribed from the promoter of the gene, same as the mRNA, but in the antisense direction. The NAT is transcribed from a downstream promoter of its own in the antisense direction, such that the transcript overlaps at least partially with the mRNA. FIG. 1B shows an illustrative schematic of the interaction of regRNA with enhancer and promoter regions to recruit transcription factors and regulators that modulate gene expression.

[0056] FIG. 2 provides exemplary ASO sequences and chemistries targeting human SYNGAP1 regRNAs. Light gray shading indicates 2′-MOE; * indicates 5Me-C; dark gray shading indicates LNA; dark gray line indicates phosphodiester bond (PO); white indicates DNA. FIG. 2 discloses SEQ ID NOS 592-701, 742-851, 544-568, 4853, 4854, 569-594, 4855-4901, 702-719, 4902, 720-728, 4903-4913, 729-735, 4914-4917, 736-738, 4918, 739-741 and 4919, respectively, in order of appearance.

[0057] FIG. 3 shows that SYNGAP1 regRNAs RR86 and RR93 were detected in HEK293 and SK-N-AS cells, as well as human brain samples via RNA capture seq and qPCR.

[0058] FIGS. 4A and 4B show SYNGAP1 mRNA levels in HEK293 cells (FIG. 4A) and SK-N-AS cells (FIG. 4B) after treatment with the indicated SYNGAP1 regRNA targeting ASOs, or a gapmer non-targeting control (NTC) ASO (CO-1588), a steric NTC ASO (CO-1589), or untreated control (“UTC” or “No ASO”). FIGS. 4C and 4D show a dose dependent increase of SYNGAP1 mRNA levels in HEK293 cells (FIG. 4C) and SK-N-AS cells (FIG. 4D) after treatment with the indicated SYNGAP1 regRNA targeting ASOs, as compared to cells treated with a gapmer NTC ASO (control; CO-1588). FIGS. 4E and 4F show a dose dependent increase of SYNGAP1 mRNA levels in HEK293 cells (FIG. 4E) and SK-N-AS cells (FIG. 4F) after treatment with the indicated ASOs, as compared to cells treated with a gapmer NTC ASO (control; CO-1588).

[0059] FIG. 5 shows SYNGAP1 mRNA levels in SK-N-AS cells and HEK293 cells after treatment with the indicated SYNGAP1 regRNA targeting ASOs, or a gapmer non-targeting control (NTC) ASO (CO-1588), a steric NTC ASO (CO-1589), or untreated control (“UTC”).

[0060] FIG. 6 shows a dose dependent upregulation of SYNGAP1 mRNA levels in both SK-N-AS and HEK293 cells after treatment with the indicated SYNGAP1 regRNA targeting ASOs, as compared to untreated control (“UTC”) or cells treated with a gapmer NTC ASO (control; CO-1588).

[0061] FIG. 7 shows SYNGAP1 mRNA levels in neurons differentiated from human induced pluripotent stem cells after treatment with the indicated concentrations of SYNGAP1 regRNA targeting ASOs or a gapmer NTC ASO (CO-1588; control).

### DETAILED DESCRIPTION

[0062] The present disclosure provides antisense oligonucleotides (ASOs) targeting regulatory RNAs, such as promoter-associated RNAs (paRNAs) and enhancer RNAs (eRNAs), and methods using these ASOs to regulate gene expression. These methods are useful for modulating the levels of gene products, for example, modulating expression levels of SYNGAP1, to thereby treat SYNGAP1-related disorder (e.g., diseases associated with SYNGAP1 mutations), such as mental retardation, autosomal dominant 5 (MRD5) and SYNGAP1-related non-syndromic intellectual disability (NSID) or other disease or disorders.

[0063] Various aspects of the compositions and methods described in the present application are set forth in the sections below.

### I. Definitions

[0064] To facilitate an understanding of the present application, a number of terms and phrases are defined below.

[0065] The terms “a” and “an” as used herein mean “one or more” and include the plural unless the context is inappropriate.

[0066] As used herein, the terms “SYNGAPl” or “synaptic Ras GTPase activating protein 1” refer to the gene of NCBI Gene ID: 8831 or Hugo Gene Nomenclature Committee (HGNC) ID: 11497 when used in reference to the human gene, or the protein of UniProt Accession No. Q96PVO (human) when used in reference to a human version of the protein, and to the gene of NCBI Gene ID: 240057 when used in reference to the mouse gene, or to the protein of UniProt Accession No. J3QQ18 (mouse), when used in reference to a mouse version of the protein, and related isoforms and orthologs of the foregoing. SYNGAP1 is a protein of the post-synaptic density (PSD) of glutamatergic neurons that interacts with PSD95 and SAP102, and is capable of positively or negatively regulating the density of N-Methyl-D-aspartic acid (NMDA) and α-amino-3-hydroxy-5-methyl-4-isoxazolepropionic acid (AMPA) receptors at the glutamatergic synapses, and also negatively regulates small G protein signaling downstream of glutamate receptor activation (see, e.g., Jeyabalan et al. (2016) Front. Cell Neurosci. 10: 32, incorporated herein by reference). In some embodiments, a SYNGAP1 protein comprises an isoform of SYNGAP1 (e.g., an N-terminus isoform A, B, and C and/or a C-terminus isoform alpha1 (α1), alpha2 (α2), beta (β), or gamma (γ) of human SYNGAP1. In some embodiments, a SYNGAP1 protein comprises an isoform selected from SYNGAP1 Aα1, SYNGAP1 Aα2, SYNGAP1 Aβ, SYNGAP1 Aγ, SYNGAP1 Bα1, SYNGAP1 Bα2, SYNGAP1 Bβ, SYNGAP1 Bγ, SYNGAP1 Cα1, SYNGAP1 Cα2, SYNGAP1 Cβ, SYNGAP1 Cγ, or any combination of the foregoing isoforms.

[0067] As used herein, the terms “regulatory RNA” and “regRNA” are used interchangeably to refer to a noncoding RNA transcribed from a regulatory element of a gene (e.g., a protein-coding gene), wherein the gene is not the noncoding RNA itself. Exemplary regulatory elements include but are not limited to promoters, enhancers, super-enhancers, and natural antisense transcripts. A noncoding RNA transcribed from a promoter, in the antisense direction, is also called “promoter RNA” or “paRNA.” A noncoding RNA transcribed from an enhancer or super-enhancer, in either the sense direction or the anti-sense direction, is also called “enhancer RNA” or “eRNA.”

[0068] As used herein, the term “nascent RNA” refers to an RNA that is still being transcribed or has just been transcribed by RNA polymerase and remains tethered to the DNA from which it is transcribed. An RNA that has dissociated from the DNA from which it is transcribed is also called an “untethered RNA.”

[0069] As used herein, the term “antisense oligonucleotide” or “ASO” refers to a single-stranded oligonucleotide having a nucleotide sequence that hybridizes with a target nucleic acid under suitable conditions or a conjugate comprising such single-stranded oligonucleotide. In some embodiments, the disclosure encompasses pharmaceutically acceptable salts of any of the ASOs described herein. Suitable pharmaceutically acceptable salts include, but are not limited to, sodium, potassium, calcium, and magnesium salts. In some embodiments, the ASOs provided herein are lyophilized and isolated as salts (e.g., sodium salts).

[0070] As used herein, in some embodiments, the stability of a regRNA is reversely correlated with the degradation rate of the regRNA. In some embodiments, where an ASO increases the stability of a regRNA, it reduces the degradation rate of the regRNA. In some embodiments, where an ASO decreases the stability of a regRNA, it increases the degradation rate of the regRNA. In some embodiments, the degradation rate of a regRNA can be measured by blocking synthesis of new regRNA and assessing the half-life of the existing regRNA.

[0071] As used herein, the terms “subject” and “patient” refer to an organism to be treated by the methods and compositions described herein. Such organisms preferably include, but are not limited to, mammals (e.g., rodents (e.g., mice), primates, simians, equines, bovines, porcines, canines, felines, and the like), and more preferably include humans.

[0072] As used herein, the term “effective amount” refers to the amount of a compound (e.g., a compound of the present application) sufficient to effect beneficial or desired results. An effective amount can be administered in one or more administrations, applications or dosages and is not intended to be limited to a particular formulation or administration route. As used herein, the term “treating” includes any effect, e.g., lessening, reducing, modulating, ameliorating or eliminating, that results in the improvement of the condition, disease, disorder, and the like, or ameliorating a symptom thereof.

[0073] As used herein, the term “pharmaceutical composition” refers to the combination of an active agent with a carrier, inert or active, making the composition especially suitable for diagnostic or therapeutic use in vivo or ex vivo.

[0074] As used herein, the term “pharmaceutically acceptable carrier” refers to any of the standard pharmaceutical carriers, such as a phosphate buffered saline solution, water, emulsions (e.g., such as an oil/water or water/oil emulsions), and various types of wetting agents. The compositions also can include stabilizers and preservatives. For examples of carriers, stabilizers and adjuvants, see e.g., Martin, Remington's Pharmaceutical Sciences, 15th Ed., Mack Publ. Co., Easton, PA (1975).

[0075] Throughout the description, where compositions are described as having, including, or comprising specific components, or where processes and methods are described as having, including, or comprising specific steps, it is contemplated that, additionally, there are compositions described in the present application that consist essentially of, or consist of, the recited components, and that there are processes and methods according to the present application that consist essentially of, or consist of, the recited processing steps.

[0076] As a general matter, compositions specifying a percentage are by weight unless otherwise specified. Further, if a variable is not accompanied by a definition, then the previous definition of the variable controls.

### II. Antisense Oligonucleotides

[0077] In some embodiments, the antisense oligonucleotides (ASO) disclosed herein hybridize with or target a regRNA (e.g., an eRNA, a paRNA, or a NAT) transcribed from a regulatory element of a SYNGAP1 gene, also referred to herein as a “SYNGAP1 regRNA”. It is understood that NATs, eRNAs, and paRNAs are regRNAs modulating (e.g., facilitating or upregulating) gene expression (FIG. 1). In some embodiments, the SYNGAP1 regRNA is a human SYNGAP1 regRNA. In some embodiments, the SYNGAP1 regRNA is a mouse SYNGAP1 regRNA. In certain embodiments, the SYNGAP1 regRNA is an eRNA. In certain embodiments, the SYNGAP1 regRNA is a paRNA. In certain embodiments, the SYNGAP1 regRNA is a NAT. In certain embodiments, the SYNGAP1 regRNA is not a polyadenylated RNA.

[0078] eRNAs can be identified using methods known in the art, such as Assay for Transposase-Accessible Chromatin using sequencing (ATAC-seq), global run-on sequencing, precision run-on sequencing, cap analysis gene expression, and histone modification analysis (see, e.g., Sartorelli & Lauberth, Nat. Struct. Mol. Biol. (2020) 27:521-28; PCT Application Publication No. WO2013/177248). paRNAs are RNAs transcribed from promoters of target genes in the antisense direction (transcripts in the sense direction are mRNAs of the target genes). They can be identified by similar methods, taking into account of their specific location and orientation. The nucleotide sequences of exemplary human and mouse SYNGAP1 regRNAs are provided in Table 1 below. Any of these human and mouse SYNGAP1 regRNAs are contemplated as a target regRNA of an ASO disclosed herein.

TABLE 1
Exemplary regRNAs

| SEQ | | |
|---|---|---|
| ID | | |
| NO | Name | Sequence |
| 1 | RR86_v1 | TAGTAGGAGGGCACAGGCCCAGGGTGTCCTCGCAACGGGCGTCCCGGGGAGCTGCTGAAGT |
| | human | CCTCCCCGCTGCAGAGGACCGAGAGGCAGGGCCCGGGAGAGAACAGCCCGGTCGGAGGGGG |
| | regRNA | TGGGCCGTCAGCCGCCCCGGAAAGCTGCGTTTCCCGGTGATTAAGTGTAGCACCCGCCCCC |
| | | GGTAGGTCCTGAGAGGGGCGAGATTAGTTGGGTACTTACCATGTGGGCCTGGCACTTGCCC |
| | | ACATCACTTTGTGTCTTCCCACCGGCCCTGCGAGGGTGGGGGTTGCCGTCCTCAGTTTCCA |
| | | GGCGGGGGAAACGGGCTGGAAGCGTCACTCAGCTAATAGTAGTGGACCTGGGACTGGAACT |
| | | CAGATTTGCTAAGGAACCAGGCAGGTTCTTTCCTGTTTTCTGCACGGGAGCATTTTAACCA |
| | | GCAATTAAAGAAACCTTATTTCTAGGTAATTTTTAAAAGA |
| 2 | RR87 | GCCGCCCCTCACCTGCCAATGATGCTCTTGATCTGGGAATCCTTCTCTGCCTGCTGCTGCC |
| | human | TTAGCCTCTTCTCACTCTGCTCCAGTCGGGCCTGATACTGCATCAGGATTTTGCTGGTTTG |
| | regRNA | TTCTTCCTGGGACAGCAGCCTCCGCTCATACTCTTCCAGCTTCCGGTTGGACATGTGCAGC |
| | | CGCTCTTTCA |
| 3 | RR88 | GATCCCTGCAAATGTAATCAAACTAAGAAGAGGCCAGCCATGGTATCTCATTCCTGTAATC |
| | human | CCAGCACTTTGGGAGGCCGAGGTGGGTGGATTGCCTGAGGTCAGGAGTTCGAGCCAGCCTG |
| | regRNA | GCCAACATAGTGAAACCCCGTCTCTAATAAAAATACAAAAACAAATTAGCTGGGCATAGTG |
| | | GCACGTGCCTGTAATCCCAGCTACTCAGGAGGCTGAGGCAGGAGAATCACTTGAACCTGGA |
| | | AGGCGGAGGTTGCAGTGAGCTGAGCTCATGCCATTGCACTCCAAGCCTGGGAAACAAGAGC |
| | | GATATTCCATCTCAAAAAAAAGAGGCCATACTGAATTAGAGTGGACCCTTAACCCACCTTA |
| | | TAAAAACTGGTGTCTTTATATGGAGAGGGAGATTTGGAGACACAGAGATACAGGATACAGA |
| | | GACACACAGAAGGAAGCCAGCTACATGAAGATGGAGGCAGAAATTAGACGGATGCAGTTAT |
| | | AAGCCCAGGAATGCCAAGGACTGCTGGCAACCTCCGGAAGCTAGGAAGAGGCAAGGAAGGA |
| | | TTCCCTGCTACAGCATCAAAGAGAGCGTGGCCCTGCTGATACCTTGCTTTTGGACTTCCAG |
| | | CCTCCTGAACTGTGAGAGAATAAATTTCTGTTGTTTTAC |
| 4 | RR93_v1 | AGGAGGAGGAGAGAGGAGGAGAGAGGAGCAGAGAGAAGCAGAGAGGAGGAGAGAGGAGGAG |
| | paRNA | GAGGAGGAGAATAAGAGCCAACGGCAGCAGCGGCAGCCGAGAGAGAGGGGGGGCGGGGGAG |
| | human | CGAGCGAGAGCGAAGAGAGCAGGAGGAGGAGGAGGAGGGAGAGACTCTGCAGCCCCCACCC |
| | regRNA | CTACTCCGGGAGGCCCAGATTGTGAGAGAGAGAGAGACCCCTGACTCAAAAACACACCAGA |
| | | GAGAGACAGAGGTCCTAAAGATGCAGACCCCAGACCCTGAGACAGAGAGACCCTAGACCCA |
| | | CAGAGAAAGATACTTCACCACCCCCCACTGTGGGGTAATTTGAGACACAGGGCCAAAATCT |
| | | AGAGGAAAAGAGACTCCTGATTTGAGGAAAAAACGACCCCAGATCCCCCAGAGAGAGAAGC |
| | | TCAATATCAAAATCTGAAAATCCAGTCTAAAAAGGGTTCTCCATACCTACAGATATCTTAG |
| | | ACTCCAGACCCTGAGATGATGATTTCAGGGACCAGGACCTGAGACCTAGACTCAGAAAAAG |
| | | ATGAGGCCCAGATTCAGAAAGAGCCAGATGTAGAATTAGAGCTTAGAGAACTCAGACCTAG |
| | | AAAGAGACCCCAGACTCAGATCTCAGAGACTGATAACTTAGAGACAGAGACACTCCTGACT |
| | | TAAGGGGAGATAGAGACTTCAGCTGGTCCGGAGATGGACAACTCAGAGACCCAAAATTCAT |
| | | GAAGAAGACTTCGAAAGACCTCAGAGTGCGACCACAGACCCTGAAACATAGAAACCCCCCA |
| | | AACCAGAAGCATAAAAGGAAACTCAATCCTAAGAAAGATCTCCACACAAATACTGAAAGAC |
| | | CCCTC |
| 5 | RR86_v2 | GTAGGTCCTGAGAGGGGCGAGATTAGTTGGGTACTTACCATGTGGGCCTGGCACTTGCCCA |
| | (nucleotides | CATCACTTTGTGTCTTCCCACCGGCCCTGCGAGGGTGGGGGTTGCCGTCCTCAGTTTCCAG |
| | 185-467 of | GCGGGGGAAACGGGCTGGAAGCGTCACTCAGCTAATAGTAGTGGACCTGGGACTGGAACTC |
| | RR86_v1) | AGATTTGCTAAGGAACCAGGCAGGTTCTTTCCTGTTTTCTGCACGGGAGCATTTTAACCAG |
| | human | CAATTAAAGAAACCTTATTTCTAGGTAATTTTTAAAAGA |
| | regRNA | |
| 6 | RR93_v2 | AGAGCGAAGAGAGCAGGAGGAGGAGGAGGAGGGAGAGACTCTGCAGCCCCCACCCCTACTC |
| | human | CGGGAGGCCCAGATTGTGAGAGAGAGAGAGACCCCTGACTCAAAAACACACCAGAGAGAGA |
| | regRNA | CAGAGGTCCTAAAGATGCAGACCCCAGACCCTGAGACAGAGAGACCCTAGACCCACAGAGA |
| | | AAGATACTTCACCACCCCCCACTGTGGGGTAATTTGAGACACAGGGCCAAAATCTAGAGGA |
| | | AAAGAGACTCCTGATTTGAGGAAAAAACGACCCCAGATCCCCCAGAGAGAGAAGCTCAATA |
| | | TCAAAATCTGAAAATCCAGTCTAAAAAGGGTTCTCCATACCTACAGATATCTTAGACTCCA |
| | | GACCCTGAGATGATGATTTCAGGGACCAGGACCTGAGACCTAGACTCAGAAAAAGATGAGG |
| | | CCCAGATTCAGAAAGAGCCAGATGTAGAATTAGAGCTTAGAGAACTCAGACCTAGAAAGAG |
| | | ACCCCAGACTCAGATCTCAGAGACTGATAACTTAGAGACAGAGACACTCCTGACTTAAGGG |
| | | GAGATAGAGACTTCAGCTGGTCCGGAGATGGACAACTCAGAGACCCAAAATTCATGAAGAA |
| | | GACTTCGAAAGACCTCAGAGTGCGACCACAGACCCTGAAACATAGAAACCCCCCAAACCAG |
| | | AAGCATAAAAGGAAACTCAATCCTAAGAAAGATCTCCACACAAATACTGAAAGACCCCTCC |
| | | GAAATCTGTCTCAGAGACAAACTCCAAACTCAAAGACAGAGATCTCAGGGAACCTCCCCTC |
| | | CCCACTTCCCTGCCCTAGAACCTCCGAGAGGTATAACCCTGACGTCAGCCTGGGAAACTCC |
| | | GAGGCATCCCCACCACCAGACCAATGACCTCAGACCTTGAAGGGAGGGGAAA |
| 7 | RR121 | CACCGTACCTCTGAAGGGGGCATAGGACATCGCGGGGATGCTCCCCCGATGGATGGAGGCT |
| | mouse | CGAGACCTGCTCATCAGGCCTGAGGGGGAGGGGGGGGGGGGACGGGGGGAGAAAAAGAAGA |
| | regRNA | GAGAAAGAGGGGGAGAGAAAGGGGGAGAAGGAGGAGGTGGAGGAGGAGGAGGAGGAGGAGA |
| | | GAGGAGGAGAGAGGAGCGGAGAGGAGCAGAGAGGAGGAGAGAGGAGGAGGAGGAGGAGAAT |
| | | AAGAGCCAACGGCAGCAGCGGCAGCAGAGAGAGGGGGGGCGGGGGAAGCGAGCTAGAGAAG |
| | | AGAGAGCAGGAGGAGGAGGGAGAGACTGCAGCCCCCACCCCTACCCAGGGAGACCCGGAAA |
| | | AGGAGAGAACGAGGGACCCCTGACTCATACACACCAGGGAAGTCCCGTAGAAGCTGACCCA |
| | | AGACCCTCAGACAGACCCCAGACCCAGAGAAAGATACTCACCACCTCACCCCCCCCCCACC |
| | | TCCATACTCAACAAATTGGGTCTCACAGATCCAAATCTAGAAGGAAAGAGACCTCTGAGCT |
| | | CAGACCCCACCCCCTAAATTAAAGAAAGGAGTCAGGGACCAGAATATGAGACTCTAGTGTC |
| | | AGCAAGGTTCTCCAGACCCATGTTAATCTTATTCGAACCCTGGACTTGTAGTTTGGGAGAC |
| | | CCAAAACAGAGACCTAGACCCAAAGAAAAAGATGAAGCCAATATTAGAAAGTGCCCCAGGC |
| | | CAGAATTAAATTTTAGAATCTAGCTAGAGGTAAGAAACCCCACATTCGTATCTCAAAGAAA |
| | | CTGCAAACTTGGGGATGAAGGAGGAGACATTCGGCTGACCCAAAGATGAAGATGACCACAT |
| | | AGAGATCTAAAATACATTACATCTGAAAGATGTGAGTTAGTGACCGATTGCGAGGTTCAAT |
| | | TTCCTGAAACAACTCCCCAGGTAACCCAGACCCTAGGAAGGGCCCAAATATTGGACCCCCA |
| | | CCCCCACAGGACCCAAATATTGGACCCCCAACCCCTCACCTACACACACAA |

[0079] The present disclosure describes ASOs that may be used to increase expression of the target gene SYNGAP1 (e.g., human SYNGAP1 or murine SYNGAP1). Without wishing to be bound by theory, this increased gene expression may be due to increasing the amount or stability of the targeted SYNGAP1 regRNA, or interference with regRNA-associated repressors that inhibit the expression of the gene to thereby increase SYNGAP1 gene expression. These ASOs are different from the ASOs previously described that were designed to inhibit eRNAs (see, e.g., PCT Application Publication Nos. WO2013/177248 and WO2017/075406). Without wishing to be bound by theory, it is hypothesized that the ASOs' ability to upregulate SYNGAP1 gene expression is attributable to the selection of a target sequence in the regRNA and/or the chemical modifications of the ASOs.

[0080] Increased SYNGAP1 gene expression can be at least about 0.1%, 0.5%, 1%, 2%, 3%, 4%, 5%, 6%, 7%, 8%, 9%, 10%, 15%, 20%, 25%, 30%, 35%, 40%4, 45%, 50%, 55%, 60%, 65%, 70%, 75%, 80%, 85%, 90%, 95%, 100%, 105%, 110%, 115%, 120%, 125%, 130%, 135%, 140%, 145%, 150%, 155%, 160%, 165%, 170%, 175%, 180%, 185%, 190%, 195%, 200%, 205%, 210%, 215%, 220%, 225%, 230%, 235%, 240%, 245%, 250%, 255%, 260%, 265%, 270%, 275%, 280%, 285%, 290%, 295%, 300%, 350%, 400%, 450%, 500%, 550%, 600%, 650%, 700%, 750%, 800%, 850%, 900%, 950%, or 1000% or more increase in expression as compared to baseline gene expression, gene expression prior to treatment, or gene expression after treatment with a control ASO. Increased SYNGAP1 gene expression can be at least about 0.1-fold, 0.5-fold, 1-fold, 1.5-fold, 2-fold, 2.5-fold, 3-fold, 3.5-fold, 4-fold, 4.5-fold, 5-fold, 5.5-fold, 6-fold, 6.5-fold, 7-fold, 7.5-fold, 8-fold, 8.5-fold, 9-fold, 9.5-fold, 10-fold or more increase in expression as compared to baseline gene expression, gene expression prior to treatment, or gene expression after treatment with a control ASO.

[0081] ASOs that hybridize to (e.g., are complementary to) a portion of any of the regulatory RNAs provided herein (e.g., as described in Table 1 above), are contemplated by the present disclosure. In some embodiments, the regulatory RNA has a nucleotide sequence of any one of SEQ ID NO: 1, 2, 3, 4, 5, 6, and 7.

### Sequences of ASOs

[0082] In certain embodiments, an ASO disclosed herein is complementary to a sequence in a SYNGAP1 regRNA (e.g., a SYNGAP1 regRNA provided in Table 1) that is no more than 300, 250, 200, 150, 100, 50, 40, 30, 20, 10, 8, 5, or 1 nucleotide(s) from the 5′ or 3′ end of the SYNGAP1 regRNA. In certain embodiments, the ASO disclosed herein is complementary to a sequence in the SYNGAP1 regRNA that is no more than 300, 250, 200, 150, 100, 50, 40, 30, 20, or 10 nucleotides from the 5′ end of the SYNGAP1 regRNA (i.e., the 5′ most nucleotide of the regRNA sequence forming a duplex with the ASO is no more than 300, 250, 200, 150, 100, 50, 40, 30, 20, 10, 8, 5, or 1 nucleotide(s) from the 5′ end of the SYNGAP1 regRNA). In certain embodiments, the ASO disclosed herein is complementary to a sequence in the SYNGAP1 regRNA that is no more than 300, 250, 200, 150, 100, 50, 40, 30, 20, 10, 8, 5, or 1 nucleotide(s) nucleotides from the 3′ end of the SYNGAP1 regRNA (i.e., the 3′ most nucleotide of the regRNA sequence forming a duplex with the ASO is no more than 300, 250, 200, 150, 100, 50, 40, 30, 20, or 10 nucleotides from the 3′ end of the SYNGAP1 regRNA). In some embodiments, provided herein are ASOs comprising a nucleotide sequence that is complementary to at least 8 nucleotides (e.g., 8, 9, 10, 11, 12, 13, 14, 15, 16, 17, 18, 19, 20, 21, 22, 23, 24, 25, 26, 27, 28, 29, 30, 31, 32, 33, 34, 35, 36, 37, 38, 39, or 40 nucleotides) of a portion of a SYNGAP1 regRNA provided herein (e.g., a regRNA comprising or consisting a portion of or the full length nucleotide sequence provided in any one of SEQ ID NOs: 1, 2, 3, 4, 5, 6, and 7). In some embodiments, provided herein are ASOs comprising or consisting of a nucleotide sequence that is complementary to at least 8 nucleotides (e.g., 8, 9, 10, 11, 12, 13, 14, 15, 16, 17, 18, 19, 20, 21, 22, 23, 24, 25, 26, 27, 28, 29, 30, 31, 32, 33, 34, 35, 36, 37, 38, 39, or 40 nucleotides) of a SYNGAP1 regRNA identified herein as RR86_v1 (SEQ ID NO: 1). In some embodiments, provided herein are ASOs comprising or consisting of a nucleotide sequence that is complementary to at least 8 nucleotides (e.g., 8, 9, 10, 11, 12, 13, 14, 15, 16, 17, 18, 19, 20, 21, 22, 23, 24, 25, 26, 27, 28, 29, 30, 31, 32, 33, 34, 35, 36, 37, 38, 39, or 40 nucleotides) of a 3′ portion of SEQ ID NO: 1 (e.g., nucleotides 185-467, 186-467, 187-467, 188-467, 189-467, 190-467, 191-467, 192-467, 193-467, 194-467, 195-467, 196-467, 197-467, 198-467, 199-467, 200-467, 201-467, 202-467, 203-467, 204-467, 205-467, 210-467, 215-467, or 220-467 of SEQ ID NO: 1). In some embodiments, provided herein are ASOs that do not comprise or consist of a nucleotide sequence that is complementary to at least 8 nucleotides (e.g., 8, 9, 10, 11, 12, 13, 14, 15, 16, 17, 18, 19, 20, 21, 22, 23, 24, 25, 26, 27, 28, 29, 30, 31, 32, 33, 34, 35, 36, 37, 38, 39, or 40 nucleotides) of a 5′ portion of SEQ ID NO: 1 (e.g., nucleotides 1-184, 1-183, 1-182, 1-181, 1-180, 1-179, 1-178, 1-177, 1-176, 1-175, 1-174, 1-173, 1-172, 1-171, 1-170, 1-169, 1-168, 1-167, 1-166, 1-165, 1-164, 1-163, 1-162, or 1-161 of SEQ ID NO: 1).

[0083] In some embodiments, provided herein are ASOs comprising or consisting of a nucleotide sequence that is complementary to at least 8 nucleotides (e.g., 8, 9, 10, 11, 12, 13, 14, 15, 16, 17, 18, 19, 20, 21, 22, 23, 24, 25, 26, 27, 28, 29, 30, 31, 32, 33, 34, 35, 36, 37, 38, 39, or 40 nucleotides) of the SYNGAP1 regRNA identified herein as RR87 (SEQ ID NO: 2).

[0084] In some embodiments, provided herein are ASOs comprising or consisting of a nucleotide sequence that is complementary to at least 8 nucleotides (e.g., 8, 9, 10, 11, 12, 13, 14, 15, 16, 17, 18, 19, 20, 21, 22, 23, 24, 25, 26, 27, 28, 29, 30, 31, 32, 33, 34, 35, 36, 37, 38, 39, or 40 nucleotides) of the SYNGAP1 regRNA identified herein as RR88 (SEQ ID NO: 3).

[0085] In some embodiments, provided herein are ASOs comprising or consisting of a nucleotide sequence that is complementary to at least 8 nucleotides (e.g., 8, 9, 10, 11, 12, 13, 14, 15, 16, 17, 18, 19, 20, 21, 22, 23, 24, 25, 26, 27, 28, 29, 30, 31, 32, 33, 34, 35, 36, 37, 38, 39, or 40 nucleotides) of the SYNGAP1 regRNA identified herein as RR93_v1 (SEQ ID NO: 4).

[0086] In some embodiments, provided herein are ASOs comprising or consisting of a nucleotide sequence that is complementary to at least 8 nucleotides (e.g., 8, 9, 10, 11, 12, 13, 14, 15, 16, 17, 18, 19, 20, 21, 22, 23, 24, 25, 26, 27, 28, 29, 30, 31, 32, 33, 34, 35, 36, 37, 38, 39, or 40 nucleotides) of the SYNGAP1 regRNA identified herein as RR86_v2 (SEQ ID NO: 5).

[0087] In some embodiments, provided herein are ASOs comprising or consisting of a nucleotide sequence that is complementary to at least 8 nucleotides (e.g., 8, 9, 10, 11, 12, 13, 14, 15, 16, 17, 18, 19, 20, 21, 22, 23, 24, 25, 26, 27, 28, 29, 30, 31, 32, 33, 34, 35, 36, 37, 38, 39, or 40 nucleotides) of the SYNGAP1 regRNA identified herein as RR93_v2 (SEQ ID NO: 6).

[0088] In some embodiments, provided herein are ASOs comprising or consisting of a nucleotide sequence that is complementary to at least 8 nucleotides (e.g., 8, 9, 10, 11, 12, 13, 14, 15, 16, 17, 18, 19, 20, 21, 22, 23, 24, 25, 26, 27, 28, 29, 30, 31, 32, 33, 34, 35, 36, 37, 38, 39, or 40 nucleotides) of the SYNGAP1 regRNA identified herein as RR121 (SEQ ID NO: 7).

[0089] In certain embodiments, the ASO is no more than 8, 9, 10, 11, 12, 13, 14, 15, 16, 17, 18, 19, 20, 21, 22, 23, 24, 25, 26, 27, 28, 29, 30, 31, 32, 33, 34, 35, 36, 37, 38, 39, 40, 50, 60, 70, 80, 90, or 100 nucleotides in length. In certain embodiments, the ASO is at least 8, 10, 15, 20, 25, 30, 40, 50, 60, 70, 80, 90, or 100 nucleotides in length. In certain embodiments, the ASO is at least 8, 9, 10, 11, 12, 13, 14, 15, 16, 17, 18, 19, or 20 nucleotides in length. In certain embodiments, the ASO is 8, 9, 10, 11, 12, 13, 14, 15, 16, 17, 18, 19, 20, 21, 22, 23, 24, 25, 26, 27, 28, 29, 30, 31, 32, 33, 34, 35, 36, 37, 38, 39, or 40 nucleotides in length.

[0090] In certain embodiments, the ASO is designed to lack a stable secondary structure formed within itself or between each other, thereby increasing the amount of the ASO in a single-stranded form ready to hybridize with the SYNGAP1 regRNA. Methods to predict secondary structures are known in the art (see, e.g., Seetin and Mathews, Methods Mol. Biol. (2012) 905:99-122; Zhao et al., PLoS Comput. Biol. (2021) 17(8):e1009291) and web-based programs (e.g., RNAfold) are available to public users.

[0091] For example, ASOs have been designed to target a human SYNGAP1 regRNA (e.g., an eRNA, a NAT or a paRNA). The nucleotide sequences of some of these ASOs are provided in Table 2 below. In some embodiments, an ASO of the disclosure comprises or consists of a nucleotide sequence provided in any one of Tables 2-4. In some embodiments, an ASO of the disclosure comprises or consists of a nucleotide sequence and/or a chemistry modification as provided in Table 2. Any chemical modification or combination of chemical modifications described herein can be applied to any ASO sequence provided herein (e.g., in Table 2, 3, or 4). In some embodiments, an ASO comprises or consists of a nucleotide sequence and/or a chemistry modification of any one of SEQ ID NOs: 10-4852. In some embodiments, an ASO comprises or consists of a nucleotide sequence and/or a chemistry modification of any one of SEQ ID NOs: 10-1003, 1004-2961, or 2962-4852.

[0092] Additional ASO sequences that target SYNGAP1 regRNAs RR86_v1, RR86_v2, RR93_v1, and RR93_v2 are provided in Tables 3 and 4. In some embodiments, an ASO of the disclosure comprises or consists of a nucleotide sequence selected from any one of the ASOs provided in Tables 2-4. In some embodiments, the ASO comprises or consists of a nucleotide sequence as set for in any one of SEQ ID NOs: 1004-2961 or 2962-4852.

TABLE 2
Exemplary SYNGAP1 regRNA-targeting ASO sequences and descriptions of chemical modifications

| | | | | Sequence |
|---|---|---|---|---|
| | | | | MOE (M); DNA (d); |
| SEQ ID NO | Name | Sequence | SEQ ID NO | LNA (l); 2′ OMethyl (m); PS (=); PO(-); 5-MethylCytosine (5C); Teg-GalNAc [TEG] |
| 10 | CO-7451 | ACTTCAGCAGCTCCCCGGGA | 542 | MA=M5C=MT=MT=M5C=MA=MG=M5C=MA=MG=M5C=MT=M5C=M5C=M5C=M5C=MG=MG=MG=MA |
| 11 | CO-7452 | TGCCTCTCGGTCCTCTGCAG | 543 | MT=MG=M5C=M5C=MT=M5C=MT=M5C=MG=MG=MT=M5C=M5C=MT=M5C=MT=MG=M5C=MA=MG |
| 12 | CO-7426 | ACTTCAGCAGCTCCCCGGGA | 544 | MA=M5C=MT=MT=M5C=dA=dG=d5C=dA=dG=d5C=dT=d5C=d5C=d5C=M5C=MG=MG=MG=MA |
| 13 | CO-7427 | TGCCTCTCGGTCCTCTGCAG | 545 | MT=MG=M5C=M5C=MT=d5C=dT=d5C=dG=dG=dT=d5C=d5C=dT=d5C=MT=MG=M5C=MA=MG |
| 14 | CO-7428 | AATCTCGCCCCTCTCAGGAC | 546 | MA=MA=MT=M5C=MT=d5C=dG=d5C=d5C=d5C=d5C=dT=d5C=dT=d5C=MA=MG=MG=MA=M5C |
| 15 | CO-7429 | CCAACTAATCTCGCCCCTCT | 547 | M5C=M5C=MA=MA=M5C=dT=dA=dA=dT=d5C=dT=d5C=dG=d5C=d5C=M5C=M5C=MT=M5C=MT |
| 16 | CO-7430 | TAAGTACCCAACTAATCTCG | 548 | MT=MA=MA=MG=MT=dA=d5C=d5c=d5C=dA=dA=d5C=dT=dA=dA=MT=M5C=MT=M5C=MG |
| 17 | CO-7431 | CAGGCCCACATGGTAAGTAC | 549 | M5C=MA=MG=MG=M5C=d5C=d5C=dA=d5C=dA=dT=dG=dG=dT=dA=MA=MG=MT=MA=M5C |
| 18 | CO-7432 | GCAAGTGCCAGGCCCACATG | 550 | MG=M5C=MA=MA=MG=dT=dG=d5C=d5C=dA=dG=dG=d5C=d5C=d5C=MA=M5C=MA=MT=MG |
| 19 | CO-7433 | TGGGAAGACACAAAGTGATG | 551 | MT=MG=MG=MG=MA=dA=dG=dA=d5C=dA=d5C=dA=dA=dA=dG=MT=MG=MA=MT=MG |
| 20 | CO-7434 | ACTGAGGACGGCAACCCCCA | 552 | MA=M5C=MT=MG=MA=dG=dG=dA=d5C=dG=dG=d5C=dA=dA=d5C=M5C=M5C=M5C=M5C=MA |
| 21 | CO-7435 | CTGGAAACTGAGGACGGCAA | 553 | M5C=MT=MG=MG=MA=dA=dA=d5C=dT=dG=dA=dG=dG=dA=d5C=MG=MG=M5C=MA=MA |
| 22 | CO-7436= | TTTCCCCCGCCTGGAAACTG | 554 | MT=MT=MT=M5C=M5C=d5C=d5C=d5C=dG=d5C=d5C=dT=dG=dG=dA=MA=MA=M5C=MT=MG |
| 23 | CO-7437 | GTGACGCTTCCAGCCCGTTT | 555 | MG=MT=MG=MA=M5C=dG=d5C=dT=dT=d5C=d5C=dA=dG=d5C=d5C=M5C=MG=MT=MT=MT |
| 24 | CO-7438 | TAGCTGAGTGACGCTTCCAG | 556 | MT=MA=MG=M5C=MT=dG=dA=dG=dT=dG=dA=d5C=dG=d5C=dT=MT=M5C=M5C=MA=MG |
| 25 | CO-7439 | TACTATTAGCTGAGTGACGC | 557 | MT=MA=M5C=MT=MA=dT=dT=dA=dG=d5C=dT=dG=dA=dG=dT=MG=MA=M5C=MG=M5C |
| 26 | CO-7440 | GGTCCACTACTATTAGCTGA | 558 | MG=MG=MT=M5C=M5C=dA=d5C=dT=dA=d5C=dT=dA=dT=dT=dA=MG=M5C=MT=MG=MA |
| 27 | CO-7441 | GTCCCAGGTCCACTACTATT | 559 | MG=MT=M5C=M5C=M5C=dA=dG=dG=dT=d5C=d5C=dA=d5C=dT=dA=M5C=MT=MA=MT=MT |
| 28 | CO-7442 | GTTCCAGTCCCAGGTCCACT | 560 | MG=MT=MT=M5C=M5C=dA=dG=dT=d5C=d5C=d5C=dA=dG=dG=dT=M5C=M5C=MA=M5C=MT |
| 29 | CO-7443 | AATCTGAGTTCCAGTCCCAG | 561 | MA=MA=MT=M5C=MT=dG=dA=dG=dT=dT=d5C=d5C=dA=dG=dT=M5C=M5C=M5C=MA=MG |
| 30 | CO-7444 | CCTTAGCAAATCTGAGTTCC | 562 | M5C=M5C=MT=MT=MA=dG=d5C=dA=dA=dA=dT=d5C=dT=dG=dA=MG=MT=MT=M5C=M5C |
| 31 | CO-7445 | GCCTGGTTCCTTAGCAAATC | 563 | MG=M5C=M5C=MT=MG=dG=dT=dT=d5C=d5C=dT=dT=dA=dG=d5C=MA=MA=MA=MT=M5C |
| 32 | CO-7446 | GTGCAGAAAACAGGAAAGAA | 564 | MG=MT=MG=M5C=MA=dG=dA=dA=dA=dA=d5C=dA=dG=dG=dA=MA=MA=MG=MA=MA |
| 33 | CO-7447 | GCTCCCGTGCAGAAAACAGG | 565 | MG=M5C=MT=M5C=M5C=d5C=dG=dT=dG=d5C=dA=dG=dA=dA=dA=MA=M5C=MA=MG=MG |
| 34 | CO-7448 | TGGTTAAAATGCTCCCGTGC | 566 | MT=MG=MG=MT=MT=dA=dA=dA=dA=dT=dG=d5C=dT=d5C=d5C=M5C=MG=MT=MG=M5C |
| 35 | CO-7449 | AATTGCTGGTTAAAATGCTC | 567 | MA=MA=MT=MT=MG=d5C=dT=dG=dG=dT=dT=dA=dA=dA=dA=MT=MG=M5C=MT=M5C |
| 36 | CO-7450 | AAGGTTTCTTTAATTGCTGG | 568 | MA=MA=MG=MG=MT=dT=dT=d5C=dT=dT=dT=dA=dA=dT=dT=MG=M5C=MT=MG=MG |
| 37 | CO-7453 | AATCTCGCCCCTCTCAGGAC | 569 | MA=MA=MT=M5C=MT=M5C=MG=M5C=M5C=M5C=M5C=MT=M5C=MT=M5C=MA=MG=MG=MA=M5C |
| 38 | CO-7454 | CCAACTAATCTCGCCCCTCT | 570 | M5C=M5C=MA=MA=M5C=MT=MA=MA=MT=M5C=MT=M5C=MG=M5C=M5C=M5C=M5C=MT=M5C=MT |
| 39 | CO-7455 | TAAGTACCCAACTAATCTCG | 571 | MT=MA=MA=MG=MT=MA=M5C=M5C=M5C=MA=MA=M5C=MT=MA=MA=MT=M5C=MT=M5C=MG |
| 40 | CO-7456 | CAGGCCCACATGGTAAGTAC | 572 | M5C=MA=MG=MG=M5C=M5C=M5C=MA=M5C=MA=MT=MG=MG=MT=MA=MA=MG=MT=MA=M5C |
| 41 | CO-7457 | GCAAGTGCCAGGCCCACATG | 573 | MG=M5C=MA=MA=MG=MT=MG=M5C=M5C=MA=MG=MG=M5C=M5C=M5C=MA=M5C=MA=MT=MG |
| 42 | CO-7458 | TGGGAAGACACAAAGTGATG | 574 | MT=MG=MG=MG=MA=MA=MG=MA=M5C=MA=M5C=MA=MA=MA=MG=MT=MG=MA=MT=MG |
| 43 | CO-7459 | ACTGAGGACGGCAACCCCCA | 575 | MA=M5C=MT=MG=MA=MG=MG=MA=M5C=MG=MG=M5C=MA=MA=M5C=M5C=M5C=M5C=M5C=MA |
| 44 | CO-7460 | CTGGAAACTGAGGACGGCAA | 576 | M5C=MT=MG=MG=MA=MA=MA=M5C=MT=MG=MA=MG=MG=MA=M5C=MG=MG=M5C=MA=MA |
| 45 | CO-7461 | TTTCCCCCGCCTGGAAACTG | 577 | MT=MT=MT=M5C=M5C=M5C=M5C=M5C=MG=M5C=M5C=MT=MG=MG=MA=MA=MA=M5C=MT=MG |
| 46 | CO-7462 | GTGACGCTTCCAGCCCGTTT | 578 | MG=MT=MG=MA=M5C=MG=M5C=MT=MT=M5C=M5C=MA=MG=M5C=M5C=M5C=MG=MT=MT=MT |
| 47 | CO-7463 | TAGCTGAGTGACGCTTCCAG | 579 | MT=MA=MG=M5C=MT=MG=MA=MG=MT=MG=MA=M5C=MG=M5C=MT=MT=M5C=M5C=MA=MG |
| 48 | CO-7464 | TACTATTAGCTGAGTGACGC | 580 | MT=MA=M5C=MT=MA=MT=MT=MA=MG=M5C=MT=MG=MA=MG=MT=MG=MA=M5C=MG=M5C |
| 49 | CO-7465 | GGTCCACTACTATTAGCTGA | 581 | MG=MG=MT=M5C=M5C=MA=M5C=MT=MA=M5C=MT=MA=MT=MT=MA=MG=M5C=MT=MG=MA |
| 50 | CO-7466 | GTCCCAGGTCCACTACTATT | 582 | MG=MT=M5C=M5C=M5C=MA=MG=MG=MT=M5C=M5C=MA=M5C=MT=MA=M5C=MT=MA=MT=MT |
| 51 | CO-7467 | GTTCCAGTCCCAGGTCCACT | 583 | MG=MT=MT=M5C=M5C=MA=MG=MT=M5C=M5C=M5C=MA=MG=MG=MT=M5C=M5C=MA=M5C=MT |
| 52 | CO-7468 | AATCTGAGTTCCAGTCCCAG | 584 | MA=MA=MT=M5C=MT=MG=MA=MG=MT=MT=M5C=M5C=MA=MG=MT=M5C=M5C=M5C=MA=MG |
| 53 | CO-7469 | CCTTAGCAAATCTGAGTTCC | 585 | M5C=M5C=MT=MT=MA=MG=M5C=MA=MA=MA=MT=M5C=MT=MG=MA=MG=MT=MT=M5C=M5C |
| 54 | CO-7470 | GCCTGGTTCCTTAGCAAATC | 586 | MG=M5C=M5C=MT=MG=MG=MT=MT=M5C=M5C=MT=MT=MA=MG=M5C=MA=MA=MA=MT=M5C |
| 55 | CO-7471 | GTGCAGAAAACAGGAAAGAA | 587 | MG=MT=MG=M5C=MA=MG=MA=MA=MA=MA=M5C=MA=MG=MG=MA=MA=MA=MG=MA=MA |
| 56 | CO-7472 | GCTCCCGTGCAGAAAACAGG | 588 | MG=M5C=MT=M5C=M5C=M5C=MG=MT=MG=M5C=MA=MG=MA=MA=MA=MA=M5C=MA=MG=MG |
| 57 | CO-7473 | TGGTTAAAATGCTCCCGTGC | 589 | MT=MG=MG=MT=MT=MA=MA=MA=MA=MT=MG=M5C=MT=M5C=M5C=M5C=MG=MT=MG=M5C |
| 58 | CO-7474 | AATTGCTGGTTAAAATGCTC | 590 | MA=MA=MT=MT=MG=M5C=MT=MG=MG=MT=MT=MA=MA=MA=MA=MT=MG=M5C=MT=M5C |
| 59 | CO-7475 | AAGGTTTCTTTAATTGCTGG | 591 | MA=MA=MG=MG=MT=MT=MT=M5C=MT=MT=MT=MA=MA=MT=MT=MG=M5C=MT=MG=MG |
| 60 | CO-7476 | GCAGCAGGCAGAGAAGGATT | | |
| 61 | CO-7477 | GTCCCAGGAAGAACAAACCA | | |
| 62 | CO-7478 | GCTGCTGTCCCAGGAAGAAC | | |
| 63 | CO-7479 | CTGGAAGAGTATGAGCGGAG | | |
| 64 | CO-7480 | CGGAAGCTGGAAGAGTATGA | | |
| 65 | CO-7481 | TCCAACCGGAAGCTGGAAGA | | |
| 66 | CO-7482 | GGCTGCACATGTCCAACCGG | | |
| 67 | CO-7483 | GCAGCAGGCAGAGAAGGATT | | |
| 68 | CO-7484 | GTCCCAGGAAGAACAAACCA | | |
| 69 | CO-7485 | GCTGCTGTCCCAGGAAGAAC | | |
| 70 | CO-7486 | CTGGAAGAGTATGAGCGGAG | | |
| 71 | CO-7487 | CGGAAGCTGGAAGAGTATGA | | |
| 72 | CO-7488 | TCCAACCGGAAGCTGGAAGA | | |
| 73 | CO-7489 | GGCTGCACATGTCCAACCGG | | |
| 74 | CO-7490 | GGAATGAGATACCATGGCTG | | |
| 75 | CO-7491 | TCAGTATGGCCTCTTTTTTT | | |
| 76 | CO-7492 | TCTAATTCAGTATGGCCTCT | | |
| 77 | CO-7493 | GTTAAGGGTCCACTCTAATT | | |
| 78 | CO-7494 | TATAAGGTGGGTTAAGGGTC | | |
| 79 | CO-7495 | GACACCAGTTTTTATAAGGT | | |
| 80 | CO-7496 | CCATATAAAGACACCAGTTT | | |
| 81 | CO-7497 | CTCCCTCTCCATATAAAGAC | | |
| 82 | CO-7498 | TATCTCTGTGTCTCCAAATC | | |
| 83 | CO-7499 | GTATCCTGTATCTCTGTGTC | | |
| 84 | CO-7500 | GTGTGTCTCTGTATCCTGTA | | |
| 85 | CO-7501 | GTAGCTGGCTTCCTTCTGTG | | |
| 86 | CO-7502 | CTTCATGTAGCTGGCTTCCT | | |
| 87 | CO-7503 | CTCCATCTTCATGTAGCTGG | | |
| 88 | CO-7504 | GCATCCGTCTAATTTCTGCC | | |
| 89 | CO-7505 | CTTATAACTGCATCCGTCTA | | |
| 90 | CO-7506 | GCTGTAGCAGGGAATCCTTC | | |
| 91 | CO-7507 | GCCACGCTCTCTTTGATGCT | | |
| 92 | CO-7508 | GGAATGAGATACCATGGCTG | | |
| 93 | CO-7509 | TCAGTATGGCCTCTTTTTTT | | |
| 94 | CO-7510 | TCTAATTCAGTATGGCCTCT | | |
| 95 | CO-7511 | GTTAAGGGTCCACTCTAATT | | |
| 96 | CO-7512 | TATAAGGTGGGTTAAGGGTC | | |
| 97 | CO-7513 | GACACCAGTTTTTATAAGGT | | |
| 98 | CO-7514 | CCATATAAAGACACCAGTTT | | |
| 99 | CO-7515 | CTCCCTCTCCATATAAAGAC | | |
| 100 | CO-7516 | TATCTCTGTGTCTCCAAATC | | |
| 101 | CO-7517 | GTATCCTGTATCTCTGTGTC | | |
| 102 | CO-7518 | GTGTGTCTCTGTATCCTGTA | | |
| 103 | CO-7519 | GTAGCTGGCTTCCTTCTGTG | | |
| 104 | CO-7520 | CTTCATGTAGCTGGCTTCCT | | |
| 105 | CO-7521 | CTCCATCTTCATGTAGCTGG | | |
| 106 | CO-7522 | GCATCCGTCTAATTTCTGCC | | |
| 107 | CO-7523 | CTTATAACTGCATCCGTCTA | | |
| 108 | CO-7524 | GCTGTAGCAGGGAATCCTTC | | |
| 109 | CO-7525 | GCCACGCTCTCTTTGATGCT | | |
| 110 | CO-9338 | CGTTGGCTCTTATTCTCCTC | 592 | M5C=MG=MT=MT=MG=dG=d5C=dT=d5C=dT=dT=dA=dT=dT=d5C=MT=M5C=M5C=MT=M5C |
| 111 | CO-9339 | CTCTCTGGTGTGTTTTTGAG | 593 | M5C=MT=M5C=MT=M5C=dT=dG=dG=dT=dG=dT=dG=dT=dT=dT=MT=MT=MG=MA=MG |
| 112 | CO-9340 | TGCATCTTTAGGACCTCTGT | 594 | MT=MG=M5C=MA=MT=d5C=dT=dT=dT=dA=dG=dG=dA=d5C=d5C=MT=M5C=MT=MG=MT |
| 113 | CO-9341 | GGTGGTGAAGTATCTTTCTC | 595 | MG=MG=MT=MG=MG=dT=dG=dA=dA=dG=dT=dA=dT=d5C=dT=MT=MT=M5C=MT=M5C |
| 114 | CO-9342 | GTCTCAAATTACCCCACAGT | 596 | MG=MT=M5C=MT=M5C=dA=dA=dA=dT=dT=dA=d5C=d5C=d5C=d5C=MA=M5C=MA=MG=MT |
| 115 | CO-9343 | AGATTTTGGCCCTGTGTCTC | 597 | MA=MG=MA=MT=MT=dT=dT=dG=dG=d5C=d5C=d5C=dT=dG=dT=MG=MT=M5C=MT=M5C |
| 116 | CO-9344 | GAGTCTCTTTTCCTCTAGAT | 598 | MG=MA=MG=MT=M5C=dT=d5C=dT=dT=dT=dT=d5C=d5C=dT=d5C=MT=MA=MG=MA=MT |
| 117 | CO-9345 | GGTCGTTTTTTCCTCAAATC | 599 | MG=MG=MT=M5C=MG=dT=dT=dT=dT=dT=dT=d5C=d5C=dT=d5C=MA=MA=MA=MT=M5C |
| 118 | CO-9346 | TGATATTGAGCTTCTCTCTC | 600 | MT=MG=MA=MT=MA=dT=dT=dG=dA=dG=d5C=dT=dT=d5C=dT=M5C=MT=M5C=MT=M5C |
| 119 | CO-9347 | GTAGGTATGGAGAACCCTTT | 601 | MG=MT=MA=MG=MG=dT=dA=dT=dG=dG=dA=dG=dA=dA=d5C=M5C=M5C=MT=MT=MT |
| 120 | CO-9348 | GGAGTCTAAGATATCTGTAG | 602 | MG=MG=MA=MG=MT=d5C=dT=dA=dA=dG=dA=dT=dA=dT=d5C=MT=MG=MT=MA=MG |
| 121 | CO-9349 | GAGTCTAGGTCTCAGGTCCT | 603 | MG=MA=MG=MT=M5C=dT=dA=dG=dG=dT=d5C=dT=d5C=dA=dG=MG=MT=M5C=M5C=MT |
| 122 | CO-9350 | GCTCTAATTCTACATCTGGC | 604 | MG=M5C=MT=M5C=MT=dA=dA=dT=dT=d5C=dT=dA=d5C=dA=dT=M5C=MT=MG=MG=M5C |
| 123 | CO-9351 | CTAGGTCTGAGTTCTCTAAG | 605 | M5C=MT=MA=MG=MG=dT=d5C=dT=dG=dA=dG=dT=dT=d5C=dT=M5C=MT=MA=MA=MG |
| 124 | CO-9352 | GTCTCTAAGTTATCAGTCTC | 606 | MG=MT=M5C=MT=M5C=dT=dA=dA=dG=dT=dT=dA=dT=d5C=dA=MG=MT=M5C=MT=M5C |
| 125 | CO-9353 | TAAGTCAGGAGTGTCTCTGT | 607 | MT=MA=MA=MG=MT=d5C=dA=dG=dG=dA=dG=dT=dG=dT=d5C=MT=M5C=MT=MG=MT |
| 126 | CO-9354 | GTCTCTATCTCCCCTTAAGT | 608 | MG=MT=M5C=MT=M5C=dT=dA=dT=d5C=dT=d5C=d5c=d5C=d5C=dT=MT=MA=MA=MG=MT |
| 127 | CO-9355 | ATCTCCGGACCAGCTGAAGT | 609 | MA=MT=M5C=MT=M5C=d5C=dG=dG=dA=d5C=d5C=dA=dG=d5C=dT=MG=MA=MA=MG=MT |
| 128 | CO-9356 | GTCTCTGAGTTGTCCATCTC | 610 | MG=MT=M5C=MT=M5C=dT=dG=dA=dG=dT=dT=dG=dT=d5C=d5C=MA=MT=M5C=MT=M5C |
| 129 | CO-9357 | TCTTCATGAATTTTGGGTCT | 611 | MT=M5C=MT=MT=M5C=dA=dT=dG=dA=dA=dT=dT=dT=dT=dG=MG=MG=MT=M5C=MT |
| 130 | CO-9358 | CGCACTCTGAGGTCTTTCGA | 612 | M5C=MG=M5C=MA=M5C=dT=d5C=dT=dG=dA=dG=dG=dT=d5C=dT=MT=MT=M5C=MG=MA |
| 131 | CO-9359 | GGGTTTCTATGTTTCAGGGT | 613 | MG=MG=MG=MT=MT=dT=d5C=dT=dA=dT=dG=dT=dT=dT=d5C=MA=MG=MG=MG=MT |
| 132 | CO-9360 | CTTTTATGCTTCTGGTTTGG | 614 | M5C=MT=MT=MT=MT=dA=dT=dG=d5C=dT=dT=d5C=dT=dG=dG=MT=MT=MT=MG=MG |
| 133 | CO-9361 | GTGTGGAGATCTTTCTTAGG | 615 | MG=MT=MG=MT=MG=dG=dA=dG=dA=dT=d5C=dT=dT=dT=d5C=MT=MT=MA=MG=MG |
| 134 | CO-9362 | GGTCTTTCAGTATTTGTGTG | 616 | MG=MG=MT=M5C=MT=dT=dT=d5C=dA=dG=dT=dA=dT=dT=dT=MG=MT=MG=MT=MG |
| 135 | CO-9363 | GTTGGCTCTTATTCTCCTCC | 617 | MG=MT=MT=MG=MG=d5C=dT=d5C=dT=dT=dA=dT=dT=d5C=dT=M5C=M5C=MT=M5C=M5C |
| 136 | CO-9364 | GCTCTCTTCGCTCTCGCTCG | 618 | MG=M5C=MT=M5C=MT=d5C=dT=dT=d5C=dG=d5C=dT=d5C=dT=d5C=MG=M5C=MT=M5C=MG |
| 137 | CO-9365 | CTGCAGAGTCTCTCCCTCCT | 619 | M5C=MT=MG=M5C=MA=dG=dA=dG=dT=d5C=dT=d5C=dT=d5C=d5C=M5C=MT=M5C=M5C=MT |
| 138 | CO-9366 | CTGTCTCTCTCTGGTGTGTT | 620 | M5C=MT=MG=MT=M5C=dT=d5C=dT=d5C=dT=d5C=dT=dG=dG=dT=MG=MT=MG=MT=MT |
| 139 | CO-9367 | GGACCTCTGTCTCTCTCTGG | 621 | MG=MG=MA=M5C=M5C=dT=d5C=dT=dG=dT=d5C=dT=d5C=dT=d5C=MT=M5C=MT=MG=MG |
| 140 | CO-9368 | GTCTAGGGTCTCTCTGTCTC | 622 | MG=MT=M5C=MT=MA=dG=dG=dG=dT=d5C=dT=d5C=dT=d5C=dT=MG=MT=M5C=MT=M5C |
| 141 | CO-9369 | TGTGGGTCTAGGGTCTCTCT | 623 | MT=MG=MT=MG=MG=dG=dT=d5C=dT=dA=dG=dG=dG=dT=d5C=MT=M5C=MT=M5C=MT |
| 142 | CO-9370 | CTTTCTCTGTGGGTCTAGGG | 624 | M5C=MT=MT=MT=M5C=dT=d5C=dT=dG=dT=dG=dG=dG=dT=d5C=MT=MA=MG=MG=MG |
| 143 | CO-9371 | GAAGTATCTTTCTCTGTGGG | 625 | MG=MA=MA=MG=MT=dA=dT=d5C=dT=dT=dT=d5C=dT=d5C=dT=MG=MT=MG=MG=MG |
| 144 | CO-9372 | GGGTGGTGAAGTATCTTTCT | 626 | MG=MG=MG=MT=MG=dG=dT=dG=dA=dA=dG=dT=dA=dT=d5C=MT=MT=MT=M5C=MT |
| 145 | CO-9373 | GGCCCTGTGTCTCAAATTAC | 627 | MG=MG=M5C=M5C=M5C=dT=dG=dT=dG=dT=d5C=dT=d5C=dA=dA=MA=MT=MT=MA=M5C |
| 146 | CO-9374 | GATTTTGGCCCTGTGTCTCA | 628 | MG=MA=MT=MT=MT=dT=dG=dG=d5C=d5C=d5C=dT=dG=dT=dG=MT=M5C=MT=M5C=MA |
| 147 | CO-9375 | CCTCTAGATTTTGGCCCTGT | 629 | M5C=M5C=MT=M5C=MT=dA=dG=dA=dT=dT=dT=dT=dG=dG=d5C=M5C=M5C=MT=MG=MT |
| 148 | CO-9376 | CTGTAGGTATGGAGAACCCT | 630 | M5C=MT=MG=MT=MA=dG=dG=dT=dA=dT=dG=dG=dA=dG=dA=MA=M5C=M5C=M5C=MT |
| 149 | CO-9377 | TCTGGCTCTTTCTGAATCTG | 631 | MT=M5C=MT=MG=MG=d5C=dT=d5C=dT=dT=dT=d5C=dT=dG=dA=MA=MT=M5C=MT=MG |
| 150 | CO-9378 | CTACATCTGGCTCTTTCTGA | 632 | M5C=MT=MA=M5C=MA=dT=d5C=dT=dG=dG=d5C=dT=d5C=dT=dT=MT=M5C=MT=MG=MA |
| 151 | CO-9379 | GGGTCTCTTTCTAGGTCTGA | 633 | MG=MG=MG=MT=M5C=dT=d5C=dT=dT=dT=d5C=dT=dA=dG=dG=MT=M5C=MT=MG=MA |
| 152 | CO-9380 | GTCAGGAGTGTCTCTGTCTC | 634 | MG=MT=M5C=MA=MG=dG=dA=dG=dT=dG=dT=d5C=dT=d5C=dT=MG=MT=M5C=MT=M5C |
| 153 | CO-9381 | GCTGAAGTCTCTATCTCCCC | 635 | MG=M5C=MT=MG=MA=dA=dG=dT=d5C=dT=d5C=dT=dA=dT=d5C=MT=M5C=M5C=M5C=M5C |
| 154 | CO-9382 | TCTCCGGACCAGCTGAAGTC | 636 | MT=M5C=MT=M5C=M5C=dG=dG=dA=d5C=d5C=dA=dG=d5C=dT=dG=MA=MA=MG=MT=M5C |
| 155 | CO-9383 | GGGTCTCTGAGTIGTCCATC | 637 | MG=MG=MG=MT=M5C=dT=d5C=dT=dG=dA=dG=dT=dT=dG=dT=M5C=M5C=MA=MT=M5C |
| 156 | CO-9384 | GGTCGCACTCTGAGGTCTTT | 638 | MG=MG=MT=M5C=MG=d5C=dA=d5C=dT=d5C=dT=dG=dA=dG=dG=MT=M5C=MT=MT=MT |
| 157 | CO-9385 | GGGTCTGTGGTCGCACTCTG | 639 | MG=MG=MG=MT=M5C=dT=dG=dT=dG=dG=dT=d5C=dG=d5C=dA=M5C=MT=M5C=MT=MG |
| 158 | CO-9386 | GTTTCAGGGTCTGTGGTCGC | 640 | MG=MT=MT=MT=M5C=dA=dG=dG=dG=dT=d5C=dT=dG=dT=dG=MG=MT=M5C=MG=M5C |
| 159 | CO-9387 | TCTATGTTTCAGGGTCTGTG | 641 | MT=M5C=MT=MA=MT=dG=dT=dT=dT=d5C=dA=dG=dG=dG=dT=M5C=MT=MG=MT=MG |
| 160 | CO-9388 | TTTTCAGATTTTGATATTGA | 642 | MT=MT=MT=MT=M5C=dA=dG=dA=dT=dT=dT=dT=dG=dA=dT=MA=MT=MT=MG=MA |
| 161 | CO-9389 | CCTGAAATCATCATCTCAGG | 643 | M5C=M5C=MT=MG=MA=dA=dA=dT=d5C=dA=dT=d5C=dA=dT=d5C=MT=M5C=MA=MG=MG |
| 162 | CO-9390 | AGGATTGAGTTTCCTTTTAT | 644 | MA=MG=MG=MA=MT=dT=dG=dA=dG=dT=dT=dT=d5C=d5C=dT=MT=MT=MT=MA=MT |
| 163 | CO-9391 | GAGATCTTTCTTAGGATTGA | 645 | MG=MA=MG=MA=MT=d5C=dT=dT=dT=d5C=dT=dT=dA=dG=dG=MA=MT=MT=MG=MA |
| 164 | CO-9392 | CTCTGAGACAGATTTCGGAG | 646 | M5C=MT=M5C=MT=MG=dA=dG=dA=d5C=dA=dG=dA=dT=dT=dT=M5C=MG=MG=MA=MG |
| 165 | CO-9393 | CGTTGGCTCTTATTCTCCTC | 647 | M5C=MG=MT=MT=MG=MG=M5C=MT=M5C=MT=MT=MA=MT=MT=M5C=MT=M5C=M5C=MT=M5C |
| 166 | CO-9394 | CTCTCTGGTGTGTTTTTGAG | 648 | M5C=MT=M5C=MT=M5C=MT=MG=MG=MT=MG=MT=MG=MT=MT=MT=MT=MT=MG=MA=MG |
| 167 | CO-9395 | TGCATCTTTAGGACCTCTGT | 649 | MT=MG=M5C=MA=MT=M5C=MT=MT=MT=MA=MG=MG=MA=M5C=M5C=MT=M5C=MT=MG=MT |
| 168 | CO-9396 | GGTGGTGAAGTATCTTTCTC | 650 | MG=MG=MT=MG=MG=MT=MG=MA=MA=MG=MT=MA=MT=M5C=MT=MT=MT=M5C=MT=M5C |
| 169 | CO-9397 | GTCTCAAATTACCCCACAGT | 651 | MG=MT=M5C=MT=M5C=MA=MA=MA=MT=MT=MA=M5C=M5C=M5C=M5C=MA=M5C=MA=MG=MT |
| 170 | CO-9398 | AGATTTTGGCCCTGTGTCTC | 652 | MA=MG=MA=MT=MT=MT=MT=MG=MG=M5C=M5C=M5C=MT=MG=MT=MG=MT=M5C=MT=M5C |
| 171 | CO-9399 | GAGTCTCTTTTCCTCTAGAT | 653 | MG=MA=MG=MT=M5C=MT=M5C=MT=MT=MT=MT=M5C=M5C=MT=M5C=MT=MA=MG=MA=MT |
| 172 | CO-9400 | GGTCGTTTTTTCCTCAAATC | 654 | MG=MG=MT=M5C=MG=MT=MT=MT=MT=MT=MT=M5C=M5C=MT=M5C=MA=MA=MA=MT=M5C |
| 173 | CO-9401 | TGATATTGAGCTTCTCTCTC | 655 | MT=MG=MA=MT=MA=MT=MT=MG=MA=MG=M5C=MT=MT=M5C=MT=M5C=MT=M5C=MT=M5C |
| 174 | CO-9402 | GTAGGTATGGAGAACCCTTT | 656 | MG=MT=MA=MG=MG=MT=MA=MT=MG=MG=MA=MG=MA=MA=M5C=M5C=M5C=MT=MT=MT |
| 175 | CO-9403 | GGAGTCTAAGATATCTGTAG | 657 | MG=MG=MA=MG=MT=M5C=MT=MA=MA=MG=MA=MT=MA=MT=M5C=MT=MG=MT=MA=MG |
| 176 | CO-9404 | GAGTCTAGGTCTCAGGTCCT | 658 | MG=MA=MG=MT=M5C=MT=MA=MG=MG=MT=M5C=MT=M5C=MA=MG=MG=MT=M5C=M5C=MT |
| 177 | CO-9405 | GCTCTAATTCTACATCTGGC | 659 | MG=M5C=MT=M5C=MT=MA=MA=MT=MT=M5C=MT=MA=M5C=MA=MT=M5C=MT=MG=MG=M5C |
| 178 | CO-9406 | CTAGGTCTGAGTTCTCTAAG | 660 | M5C=MT=MA=MG=MG=MT=M5C=MT=MG=MA=MG=MT=MT=M5C=MT=M5C=MT=MA=MA=MG |
| 179 | CO-9407 | GTCTCTAAGTTATCAGTCTC | 661 | MG=MT=M5C=MT=M5C=MT=MA=MA=MG=MT=MT=MA=MT=M5C=MA=MG=MT=M5C=MT=M5C |
| 180 | CO-9408 | TAAGTCAGGAGTGTCTCTGT | 662 | MT=MA=MA=MG=MT=M5C=MA=MG=MG=MA=MG=MT=MG=MT=M5C=MT=M5C=MT=MG=MT |
| 181 | CO-9409 | GTCTCTATCTCCCCTTAAGT | 663 | MG=MT=M5C=MT=M5C=MT=MA=MT=M5C=MT=M5C=M5C=M5C=M5C=MT=MT=MA=MA=MG=MT |
| 182 | CO-9410 | ATCTCCGGACCAGCTGAAGT | 664 | MA=MT=M5C=MT=M5C=M5C=MG=MG=MA=M5C=M5C=MA=MG=M5C=MT=MG=MA=MA=MG=MT |
| 183 | CO-9411 | GTCTCTGAGTTGTCCATCTC | 665 | MG=MT=M5C=MT=M5C=MT=MG=MA=MG=MT=MT=MG=MT=M5C=M5C=MA=MT=M5C=MT=M5C |
| 184 | CO-9412 | TCTTCATGAATTTTGGGTCT | 666 | MT=M5C=MT=MT=M5C=MA=MT=MG=MA=MA=MT=MT=MT=MT=MG=MG=MG=MT=M5C=MT |
| 185 | CO-9413 | CGCACTCTGAGGTCTTTCGA | 667 | M5C=MG=M5C=MA=M5C=MT=M5C=MT=MG=MA=MG=MG=MT=M5C=MT=MT=MT=M5C=MG=MA |
| 186 | CO-9414 | GGGTTTCTATGTTTCAGGGT | 668 | MG=MG=MG=MT=MT=MT=M5C=MT=MA=MT=MG=MT=MT=MT=M5C=MA=MG=MG=MG=MT |
| 187 | CO-9415 | CTTTTATGCTTCTGGTTTGG | 669 | M5C=MT=MT=MT=MT=MA=MT=MG=M5C=MT=MT=M5C=MT=MG=MG=MT=MT=MT=MG=MG |
| 188 | CO-9416 | GTGTGGAGATCTTTCTTAGG | 670 | MG=MT=MG=MT=MG=MG=MA=MG=MA=MT=M5C=MT=MT=MT=M5C=MT=MT=MA=MG=MG |
| 189 | CO-9417 | GGTCTTTCAGTATTTGTGTG | 671 | MG=MG=MT=M5C=MT=MT=MT=M5C=MA=MG=MT=MA=MT=MT=MT=MG=MT=MG=MT=MG |
| 190 | CO-9418 | GTTGGCTCTTATTCTCCTCC | 672 | MG=MT=MT=MG=MG=M5C=MT=M5C=MT=MT=MA=MT=MT=M5C=MT=M5C=M5C=MT=M5C=M5C |
| 191 | CO-9419 | GCTCTCTTCGCTCTCGCTCG | 673 | MG=M5C=MT=M5C=MT=M5C=MT=MT=M5C=MG=M5C=MT=M5C=MT=M5C=MG=M5C=MT=M5C=MG |
| 192 | CO-9420 | CTGCAGAGTCTCTCCCTCCT | 674 | M5C=MT=MG=M5C=MA=MG=MA=MG=MT=M5C=MT=M5C=MT=M5C=M5C=M5C=MT=M5C=M5C=MT |
| 193 | CO-9421 | CTGTCTCTCTCTGGTGTGTT | 675 | M5C=MT=MG=MT=M5C=MT=M5C=MT=M5C=MT=M5C=MT=MG=MG=MT=MG=MT=MG=MT=MT |
| 194 | CO-9422 | GGACCTCTGTCTCTCTCTGG | 676 | MG=MG=MA=M5C=M5C=MT=M5C=MT=MG=MT=M5C=MT=M5C=MT=M5C=MT=M5C=MT=MG=MG |
| 195 | CO-9423 | GTCTAGGGTCTCTCTGTCTC | 677 | MG=MT=M5C=MT=MA=MG=MG=MG=MT=M5C=MT=M5C=MT=M5C=MT=MG=MT=M5C=MT=M5C |
| 196 | CO-9424 | TGTGGGTCTAGGGTCTCTCT | 678 | MT=MG=MT=MG=MG=MG=MT=M5C=MT=MA=MG=MG=MG=MT=M5C=MT=M5C=MT=M5C=MT |
| 197 | CO-9425 | CTTTCTCTGTGGGTCTAGGG | 679 | M5C=MT=MT=MT=M5C=MT=M5C=MT=MG=MT=MG=MG=MG=MT=M5C=MT=MA=MG=MG=MG |
| 198 | CO-9426 | GAAGTATCTTTCTCTGTGGG | 680 | MG=MA=MA=MG=MT=MA=MT=M5C=MT=MT=MT=M5C=MT=M5C=MT=MG=MT=MG=MG=MG |
| 199 | CO-9427 | GGGTGGTGAAGTATCTTTCT | 681 | MG=MG=MG=MT=MG=MG=MT=MG=MA=MA=MG=MT=MA=MT=M5C=MT=MT=MT=M5C=MT |
| 200 | CO-9428 | GGCCCTGTGTCTCAAATTAC | 682 | MG=MG=M5C=M5C=M5C=MT=MG=MT=MG=MT=M5C=MT=M5C=MA=MA=MA=MT=MT=MA=M5C |
| 201 | CO-9429 | GATTTTGGCCCTGTGTCTCA | 683 | MG=MA=MT=MT=MT=MT=MG=MG=M5C=M5C=M5C=MT=MG=MT=MG=MT=M5C=MT=M5C=MA |
| 202 | CO-9430 | CCTCTAGATTTTGGCCCTGT | 684 | M5C=M5C=MT=M5C=MT=MA=MG=MA=MT=MT=MT=MT=MG=MG=M5C=M5C=M5C=MT=MG=MT |
| 203 | CO-9431 | CTGTAGGTATGGAGAACCCT | 685 | M5C=MT=MG=MT=MA=MG=MG=MT=MA=MT=MG=MG=MA=MG=MA=MA=M5C=M5C=M5C=MT |
| 204 | CO-9432 | TCTGGCTCTTTCTGAATCTG | 686 | MT=M5C=MT=MG=MG=M5C=MT=M5C=MT=MT=MT=M5C=MT=MG=MA=MA=MT=M5C=MT=MG |
| 205 | CO-9433 | CTACATCTGGCTCTTTCTGA | 687 | M5C=MT=MA=M5C=MA=MT=M5C=MT=MG=MG=M5C=MT=M5C=MT=MT=MT=M5C=MT=MG=MA |
| 206 | CO-9434 | GGGTCTCTTTCTAGGTCTGA | 688 | MG=MG=MG=MT=M5C=MT=M5C=MT=MT=MT=M5C=MT=MA=MG=MG=MT=M5C=MT=MG=MA |
| 207 | CO-9435 | GTCAGGAGTGTCTCTGTCTC | 689 | MG=MT=M5C=MA=MG=MG=MA=MG=MT=MG=MT=M5C=MT=M5C=MT=MG=MT=M5C=MT=M5C |
| 208 | CO-9436 | GCTGAAGTCTCTATCTCCCC | 690 | MG=M5C=MT=MG=MA=MA=MG=MT=M5C=MT=M5C=MT=MA=MT=M5C=MT=M5C=M5C=M5C=M5C |
| 209 | CO-9437 | TCTCCGGACCAGCTGAAGTC | 691 | MT=M5C=MT=M5C=M5C=MG=MG=MA=M5C=M5C=MA=MG=M5C=MT=MG=MA=MA=MG=MT=M5C |
| 210 | CO-9438 | GGGTCTCTGAGTTGTCCATC | 692 | MG=MG=MG=MT=M5C=MT=M5C=MT=MG=MA=MG=MT=MT=MG=MT=M5C=M5C=MA=MT=M5C |
| 211 | CO-9439 | GGTCGCACTCTGAGGTCTTT | 693 | MG=MG=MT=M5C=MG=M5C=MA=M5C=MT=M5C=MT=MG=MA=MG=MG=MT=M5C=MT=MT=MT |
| 212 | CO-9440 | GGGTCTGTGGTCGCACTCTG | 694 | MG=MG=MG=MT=M5C=MT=MG=MT=MG=MG=MT=M5C=MG=M5C=MA=M5C=MT=M5C=MT=MG |
| 213 | CO-9441 | GTTTCAGGGTCTGTGGTCGC | 695 | MG=MT=MT=MT=M5C=MA=MG=MG=MG=MT=M5C=MT=MG=MT=MG=MG=MT=M5C=MG=M5C |
| 214 | CO-9442 | TCTATGTTTCAGGGTCTGTG | 696 | MT=M5C=MT=MA=MT=MG=MT=MT=MT=M5C=MA=MG=MG=MG=MT=M5C=MT=MG=MT=MG |
| 215 | CO-9443 | TTTTCAGATTTTGATATTGA | 697 | MT=MT=MT=MT=M5C=MA=MG=MA=MT=MT=MT=MT=MG=MA=MT=MA=MT=MT=MG=MA |
| 216 | CO-9444 | CCTGAAATCATCATCTCAGG | 698 | M5C=M5C=MT=MG=MA=MA=MA=MT=M5C=MA=MT=M5C=MA=MT=M5C=MT=M5C=MA=MG=MG |
| 217 | CO-9445 | AGGATTGAGTTTCCTTTTAT | 699 | MA=MG=MG=MA=MT=MT=MG=MA=MG=MT=MT=MT=M5C=M5C=MT=MT=MT=MT=MA=MT |
| 218 | CO-9446 | GAGATCTTTCTTAGGATTGA | 700 | MG=MA=MG=MA=MT=M5C=MT=MT=MT=M5C=MT=MT=MA=MG=MG=MA=MT=MT=MG=MA |
| 219 | CO-9447 | CTCTGAGACAGATTTCGGAG | 701 | M5C=MT=M5C=MT=MG=MA=MG=MA=M5C=MA=MG=MA=MT=MT=MT=M5C=MG=MG=MA=MG |
| 220 | CO-10604 | GCAAGTGCCAGGCCCACATG | 702 | MG=M5C=MA=MA=MG=dT=dG=M5C=d5C=dA=MG=dG=d5C=M5C=d5C=MA=M5C=MA=MT=MG |
| 221 | CO-10605 | GCAAGTGCCAGGCCCACATG | 703 | MG=M5C=LA=MA=MG=dT=dG=d5C=d5C=dA=dG=dG=d5C=d5C=d5C=MA=M5C=LA=MT=MG |
| 222 | CO-10606 | GCAAGTGCCAGGCCCACATG | 704 | MG=M5C=LA=MA=LG=dT=dG=d5C=d5C=dA=dG=dG=d5C=d5C=d5C=MA=M5C=MA=MT=MG |
| 223 | CO-10607 | GCAAGTGCCAGGCCCACATG | 705 | MG=L5C=MA=LA=MG=dT=dG=d5C=d5C=dA=dG=dG=d5C=d5C=d5C=MA=L5C=MA=LT=MG |
| 224 | CO-10608 | GCAAGTGCCAGGCCCACATG | 706 | MG=L5C=MA=LA=MG=dT=dG=M5C=d5C=dA=MG=dG=d5C=M5C=d5C=MA=L5C=MA=LT |
| 225 | CO-10609 | GCAAGTGCCAGGCCCACATG | 707 | LG=M5C=LA=MA=MG=dT=dG=d5C=d5C=dA=dG=dG=d5C=d5C=d5C=MA=M5C=LA=MT |
| 226 | CO-10610 | GCAAGTGCCAGGCCCACATG | 708 | MG=M5C=MA-MA-MG=dT=dG=d5C=d5C=dA=dG=dG=d5C=d5C=d5C=MA-M5C-MA=MT=MG |
| 227 | CO-10611 | GCAAGTGCCAGGCCCACATG | 709 | MG=M5C-MA-MA-MG=dT=dG=d5C=d5C=dA=dG=dG=d5C=d5C=d5C=MA-M5C-MA-MT=MG |
| 228 | CO-10612 | GGCAAGTGCCAGGCCCACATGG | 710 | MG=MG=M5C=MA=MA=MG=dT=dG=d5C=d5C=dA=dG=dG=d5C=d5C=d5C=MA=M5C=MA=MT=MG=MG |
| 229 | CO-10613 | AAGTGCCAGGCCCACA | | |
| 230 | CO-10614 | TGGGAAGACACAAAGTGATG | 711 | MT=MG=MG=MG=MA=dA=dG=MA=d5C=dA=M5C=dA=dA=MA=dG=MT=MG=MA=MT=MG |
| 231 | CO-10615 | TGGGAAGACACAAAGTGATG | 712 | MT=MG=LG=MG=MA=dA=dG=dA=d5C=dA=d5C=dA=dA=dA=dG=MT=MG=LA=MT=MG |
| 232 | CO-10616 | TGGGAAGACACAAAGTGATG | 713 | MT=MG=LG=MG=LA=dA=dG=dA=d5C=dA=d5C=dA=dA=dA=dG=MT=MG=MA=MT=MG |
| 233 | CO-10617 | TGGGAAGACACAAAGTGATG | 714 | MT=LG=MG=LG=MA=dA=dG=dA=d5C=dA=d5C=dA=dA=dA=dG=MT=LG=MA=LT=MG |
| 234 | CO-10618 | TGGGAAGACACAAAGTGATG | 715 | MT=LG=MG=LG=MA=dA=dG=MA=d5C=dA=M5C=dA=dA=MA=dG=MT=LG=MA=LT=MG |
| 235 | CO-10619 | TGGGAAGACACAAAGTGATG | 716 | LT=MG=LG=MG=MA=dA=dG=dA=d5C=dA=d5C=dA=dA=dA=dG=MT=MG=LA=MT=LG |
| 236 | CO-10620 | TGGGAAGACACAAAGTGATG | 717 | MT=MG=MG-MG-MA=dA=dG=dA=d5C=dA=d5C=dA=dA=dA=dG=MT-MG-MA=MT=MG |
| 237 | CO-10621 | TGGGAAGACACAAAGTGATG | 718 | MT=MG-MG-MG-MA=dA=dG=dA=d5C=dA=d5C=dA=dA=dA=dG=MT-MG-MA-MT=MG |
| 238 | CO-10622 | GTGGGAAGACACAAAGTGATGT | 719 | MG=MT=MG=MG=MG=MA=dA=dG=dA=d5C=dA=d5C=dA=dA=dA=dG=MT=MG=MA=MT=MG=MT |
| 239 | CO-10623 | GGAAGACACAAAGTGA | | |
| 240 | CO-10624 | GCTCCCGTGCAGAAAACAGG | 720 | MG=M5C=MT=M5C=M5C=d5C=dG=MT=dG=d5C=MA=dG=dA=MA=dA=MA=M5C=MA=MG=MG |
| 241 | CO-10625 | GCTCCCGTGCAGAAAACAGG | 721 | MG=M5C=LT=M5C=M5C=d5C=dG=dT=dG=d5C=dA=dG=dA=dA=dA=MA=M5C=LA=MG=MG |
| 242 | CO-10626 | GCTCCCGTGCAGAAAACAGG | 722 | MG=M5C=LT=M5C=L5C=d5C=dG=dT=dG=d5C=dA=dG=dA=dA=dA=MA=M5C=MA=MG=MG |
| 243 | CO-10627 | GCTCCCGTGCAGAAAACAGG | 723 | MG=L5C=MT=L5C=M5C=d5C=dG=dT=dG=d5C=dA=dG=dA=dA=dA=MA=L5C=MA=LG=MG |
| 244 | CO-10628 | GCTCCCGTGCAGAAAACAGG | 724 | MG=L5C=MT=L5C=M5C=d5C=dG=MT=dG=d5C=MA=dG=dA=MA=dA=MA=L5C=MA=LG=MG |
| 245 | CO-10629 | GCTCCCGTGCAGAAAACAGG | 725 | LG=M5C=LT=M5C=M5C=d5C=dG=dT=dG=d5C=dA=dG=dA=dA=dA=MA=M5C=LA=MG=LG |
| 246 | CO-10630 | GCTCCCGTGCAGAAAACAGG | 726 | MG=M5C=MT-M5C-M5C=d5C=dG=dT=dG=d5C=dA=dG=dA=dA=dA=MA-M5C-MA=MG=MG |
| 247 | CO-10631 | GCTCCCGTGCAGAAAACAGG | 727 | MG=M5C-MT-M5C-M5C=d5C=dG=dT=dG=d5C=dA=dG=dA=dA=dA=MA-M5C-MA-MG=MG |
| 248 | CO-10632 | TGCTCCCGTGCAGAAAACAGGA | 728 | MT=MG=M5C=MT=M5C=M5C=d5C=dG=dT=dG=d5C=dA=dG=dA=dA=dA=MA=M5C=MA=MG=MG=MA |
| 250 | CO-10633 | TCCCGTGCAGAAAACA | | |
| 251 | CO-10634 | TATAAGGTGGGTTAAGGGTC | | |
| 252 | CO-10635 | TATAAGGTGGGTTAAGGGTC | | |
| 253 | CO-10636 | TATAAGGTGGGTTAAGGGTC | | |
| 254 | CO-10637 | TATAAGGTGGGTTAAGGGTC | | |
| 255 | CO-10638 | TATAAGGTGGGTTAAGGGTC | | |
| 256 | CO-10639 | TATAAGGTGGGTTAAGGGTC | | |
| 257 | CO-10640 | TATAAGGTGGGTTAAGGGTC | | |
| 258 | CO-10641 | TATAAGGTGGGTTAAGGGTC | | |
| 259 | CO-10642 | TTATAAGGTGGGTTAAGGGTCC | | |
| 260 | CO-10643 | TAAGGTGGGTTAAGGG | | |
| 261 | CO-10644 | CCAGGCCCACATGGTAAGTA | 729 | M5C=M5C=MA=MG=MG=d5C=d5C=d5C=dA=d5C=dA=dT=dG=dG=dT=MA=MA=MG=MT=MA |
| 262 | CO-10645 | CAAGTGCCAGGCCCACATGG | 730 | M5C=MA=MA=MG=MT=dG=d5C=d5C=dA=dG=dG=d5C=d5C=d5C=dA=M5C=MA=MT=MG=MG |
| 263 | CO-10646 | GGGAAGACACAAAGTGATGT | 731 | MG=MG=MG=MA=MA=dG=dA=d5C=dA=d5C=dA=dA=dA=dG=dT=MG=MA=MT=MG=MT |
| 264 | CO-10647 | CGGTGGGAAGACACAAAGTG | 732 | M5C=MG=MG=MT=MG=dG=dG=dA=dA=dG=dA=d5C=dA=d5C=dA=MA=MA=MG=MT=MG |
| 265 | CO-10648 | CGTGCAGAAAACAGGAAAGA | 733 | M5C=MG=MT=MG=M5C=dA=dG=dA=dA=dA=dA=d5C=dA=dG=dG=MA=MA=MA=MG=MA |
| 266 | CO-10649 | CCCGTGCAGAAAACAGGAAA | 734 | M5C=M5C=M5C=MG=MT=dG=d5C=dA=dG=dA=dA=dA=dA=d5C=dA=MG=MG=MA=MA=MA |
| 267 | CO-10650 | TGCTCCCGTGCAGAAAACAG | 735 | MT=MG=M5C=MT=M5C=d5C=d5C=dG=dT=dG=d5C=dA=dG=dA=dA=MA=MA=M5C=MA=MG |
| 268 | CO-10651 | GGGTTAAGGGTCCACTCTAA | | |
| 269 | CO-10652 | TAAGGTGGGTTAAGGGTCCA | | |
| 270 | CO-10653 | TTTTATAAGGTGGGTTAAGG | | |
| 271 | CO-10654 | CAGTTTTTATAAGGTGGGTT | | |
| 272 | CO-10655 | CAAGTGCCAGGCCCACATGG | 736 | M5C=LA=MA=LG=MT=dG=d5C=d5C=dA=dG=dG=d5C=d5C=d5C=dA=M5C=LA=MT=LG=MG |
| 273 | CO-10656 | GGGAAGACACAAAGTGATGT | 737 | MG=LG=MG=LA=MA=dG=dA=d5C=dA=d5C=dA=dA=dA=dG=dT=MG=LA=MT=LG=MT |
| 274 | CO-10657 | TGCTCCCGTGCAGAAAACAG | 738 | MT=LG=M5C=LT=M5C=d5C=d5C=dG=dT=dG=d5C=dA=dG=dA=dA=MA=LA=M5C=LA=MG |
| 275 | CO-10658 | TAAGGTGGGTTAAGGGTCCA | | |
| 276 | CO-10795 | GCAAGTGCCAGGCCCACATG | 739 | MG=M5C=LA=MA=LG=dT=dG=d5C=d5C=dA=dG=dG=d5C=d5C=d5C=LA=M5C=LA=MT=MG |
| 277 | CO-10796 | TGGGAAGACACAAAGTGATG | 740 | MT=MG=LG=MG=LA=dA=dG=dA=d5C=dA=d5C=dA=dA=dA=dG=LT=MG=LA=MT=MG |
| 278 | CO-10797 | GCTCCCGTGCAGAAAACAGG | 741 | MG=M5C=LT=M5C=L5C=d5C=dG=dT=dG=d5C=dA=dG=dA=dA=dA=LA=M5C=LA=MG=MG |
| 279 | CO-10798 | TATAAGGTGGGTTAAGGGTC | | |
| 280 | CO-11470 | CTCTGGTGTGTTTTTGAGTC | 742 | M5C=MT=M5C=MT=MG=dG=dT=dG=dT=dG=dT=dT=dT=dT=dT=MG=MA=MG=MT=M5C |
| 281 | CO-11471 | TCTCTCTGGTGTGTTTTTGA | 743 | MT=M5C=MT=M5C=MT=d5C=dT=dG=dG=dT=dG=dT=dG=dT=dT=MT=MT=MT=MG=MA |
| 282 | CO-11472 | AGGACCTCTGTCTCTCTCTG | 744 | MA=MG=MG=MA=M5C=d5C=dT=d5C=dT=dG=dT=d5C=dT=d5C=dT=M5C=MT=M5C=MT=MG |
| 283 | CO-11473 | CTTTAGGACCTCTGTCTCTC | 745 | M5C=MT=MT=MT=MA=dG=dG=dA=d5C=d5C=dT=d5C=dT=dG=dT=M5C=MT=M5C=MT=M5C |
| 284 | CO-11474 | CATCTTTAGGACCTCTGTCT | 746 | M5C=MA=MT=M5C=MT=dT=dT=dA=dG=dG=dA=d5C=d5C=dT=d5C=MT=MG=MT=M5C=MT |
| 285 | CO-11475 | AGGGTCTCTCTGTCTCAGGG | 747 | MA=MG=MG=MG=MT=d5C=dT=d5C=dT=d5C=dT=dG=dT=d5C=dT=M5C=MA=MG=MG=MG |
| 286 | CO-11476 | CTAGGGTCTCTCTGTCTCAG | 748 | M5C=MT=MA=MG=MG=dG=dT=d5C=dT=d5C=dT=d5C=dT=dG=dT=M5C=MT=M5C=MA=MG |
| 287 | CO-11477 | GGTCTAGGGTCTCTCTGTCT | 749 | MG=MG=MT=M5C=MT=dA=dG=dG=dG=dT=d5C=dT=d5C=dT=d5C=MT=MG=MT=M5C=MT |
| 288 | CO-11478 | TGGGTCTAGGGTCTCTCTGT | 750 | MT=MG=MG=MG=MT=d5C=dT=dA=dG=dG=dG=dT=d5C=dT=d5C=MT=M5C=MT=MG=MT |
| 289 | CO-11479 | CTGTGGGTCTAGGGTCTCTC | 751 | M5C=MT=MG=MT=MG=dG=dG=dT=d5C=dT=dA=dG=dG=dG=dT=M5C=MT=M5C=MT=M5C |
| 290 | CO-11480 | CTCTGTGGGTCTAGGGTCTC | 752 | M5C=MT=M5C=MT=MG=dT=dG=dG=dG=dT=d5C=dT=dA=dG=dG=MG=MT=M5C=MT=M5C |
| 291 | CO-11481 | TTCTCTGTGGGTCTAGGGTC | 753 | MT=MT=M5C=MT=M5C=dT=dG=dT=dG=dG=dG=dT=d5C=dT=dA=MG=MG=MG=MT=M5C |
| 292 | CO-11482 | ATCTTTCTCTGTGGGTCTAG | 754 | MA=MT=M5C=MT=MT=dT=d5C=dT=d5C=dT=dG=dT=dG=dG=dG=MT=M5C=MT=MA=MG |
| 293 | CO-11483 | AAGTATCTTTCTCTGTGGGT | 755 | MA=MA=MG=MT=MA=dT=d5C=dT=dT=dT=d5C=dT=d5C=dT=dG=MT=MG=MG=MG=MT |
| 294 | CO-11484 | GTGAAGTATCTTTCTCTGTG | 756 | MG=MT=MG=MA=MA=dG=dT=dA=dT=d5C=dT=dT=dT=d5C=dT=M5C=MT=MG=MT=MG |
| 295 | CO-11485 | TGGTGAAGTATCTTTCTCTG | 757 | MT=MG=MG=MT=MG=dA=dA=dG=dT=dA=dT=d5C=dT=dT=dT=M5C=MT=M5C=MT=MG |
| 296 | CO-11486 | CTCAAATTACCCCACAGTGG | 758 | M5C=MT=M5C=MA=MA=dA=dT=dT=dA=d5C=d5C=d5C=d5C=dA=d5C=MA=MG=MT=MG=MG |
| 297 | CO-11487 | GTGTCTCAAATTACCCCACA | 759 | MG=MT=MG=MT=M5C=dT=d5C=dA=dA=dA=dT=dT=dA=d5C=d5C=M5C=M5C=MA=M5C=MA |
| 298 | CO-11488 | CTGTGTCTCAAATTACCCCA | 760 | M5C=MT=MG=MT=MG=dT=d5C=dT=d5C=dA=dA=dA=dT=dT=dA=M5C=M5C=M5C=M5C=MA |
| 299 | CO-11489 | CCCTGTGTCTCAAATTACCC | 761 | M5C=M5C=M5C=MT=MG=dT=dG=dT=d5C=dT=d5C=dA=dA=dA=dT=MT=MA=M5C=M5C=M5C |
| 300 | CO-11490 | TTGGCCCTGTGTCTCAAATT | 762 | MT=MT=MG=MG=M5C=d5C=d5C=dT=dG=dT=dG=dT=d5C=dT=d5C=MA=MA=MA=MT=MT |
| 301 | CO-11491 | TTTTGGCCCTGTGTCTCAAA | 763 | MT=MT=MT=MT=MG=dG=d5C=d5C=d5C=dT=dG=dT=dG=dT=d5C=MT=M5C=MA=MA=MA |
| 302 | CO-11492 | CTAGATTTTGGCCCTGTGTC | 764 | M5C=MT=MA=MG=MA=dT=dT=dT=dT=dG=dG=d5C=d5C=d5C=dT=MG=MT=MG=MT=M5C |
| 303 | CO-11493 | TTCCTCTAGATTTTGGCCCT | 765 | MT=MT=M5C=M5C=MT=d5C=dT=dA=dG=dA=dT=dT=dT=dT=dG=MG=M5C=M5C=M5C=MT |
| 304 | CO-11494 | CTTTTCCTCTAGATTTTGGC | 766 | M5C=MT=MT=MT=MT=d5C=d5C=dT=d5C=dT=dA=dG=dA=dT=dT=MT=MT=MG=MG=M5C |
| 305 | CO-11495 | AGTCTCTTTTCCTCTAGATT | 767 | MA=MG=MT=M5C=MT=d5C=dT=dT=dT=dT=d5C=d5C=dT=d5C=dT=MA=MG=MA=MT=MT |
| 306 | CO-11496 | CAAATCAGGAGTCTCTTTTC | 768 | M5C=MA=MA=MA=MT=d5C=dA=dG=dG=dA=dG=dT=d5C=dT=d5C=MT=MT=MT=MT=M5C |
| 307 | CO-11497 | CCTCAAATCAGGAGTCTCTT | 769 | M5C=M5C=MT=M5C=MA=dA=dA=dT=d5C=dA=dG=dG=dA=dG=dT=M5C=MT=M5C=MT=MT |
| 308 | CO-11498 | CGTTTTTTCCTCAAATCAGG | 770 | M5C=MG=MT=MT=MT=dT=dT=dT=d5C=d5C=dT=d5C=dA=dA=dA=MT=M5C=MA=MG=MG |
| 309 | CO-11499 | GTCGTTTTTTCCTCAAATCA | 771 | MG=MT=M5C=MG=MT=dT=dT=dT=dT=dT=d5C=d5C=dT=d5C=dA=MA=MA=MT=M5C=MA |
| 310 | CO-11500 | GATATTGAGCTTCTCTCTCT | 772 | MG=MA=MT=MA=MT=dT=dG=dA=dG=d5C=dT=dT=d5C=dT=d5C=MT=M5C=MT=M5C=MT |
| 311 | CO-11501 | TTTGATATTGAGCTTCTCTC | 773 | MT=MT=MT=MG=MA=dT=dA=dT=dT=dG=dA=dG=d5C=dT=dT=M5C=MT=M5C=MT=M5C |
| 312 | CO-11502 | GATTTTGATATTGAGCTTCT | 774 | MG=MA=MT=MT=MT=dT=dG=dA=dT=dA=dT=dT=dG=dA=dG=M5C=MT=MT=M5C=MT |
| 313 | CO-11503 | TCAGATTTTGATATTGAGCT | 775 | MT=M5C=MA=MG=MA=dT=dT=dT=dT=dG=dA=dT=dA=dT=dT=MG=MA=MG=M5C=MT |
| 314 | CO-11504 | ACTGGATTTTCAGATTTTGA | 776 | MA=M5C=MT=MG=MG=dA=dT=dT=dT=dT=d5C=dA=dG=dA=dT=MT=MT=MT=MG=MA |
| 315 | CO-11505 | TAGACTGGATTTTCAGATTT | 777 | MT=MA=MG=MA=M5C=dT=dG=dG=dA=dT=dT=dT=dT=d5C=dA=MG=MA=MT=MT=MT |
| 316 | CO-11506 | CTTTTTAGACTGGATTTTCA | 778 | M5C=MT=MT=MT=MT=dT=dA=dG=dA=d5C=dT=dG=dG=dA=dT=MT=MT=MT=M5C=MA |
| 317 | CO-11507 | ACCCTTTTTAGACTGGATTT | 779 | MA=M5C=M5C=M5C=MT=dT=dT=dT=dT=dA=dG=dA=d5C=dT=dG=MG=MA=MT=MT=MT |
| 318 | CO-11508 | AGAACCCTTTTTAGACTGGA | 780 | MA=MG=MA=MA=M5C=d5C=d5C=dT=dT=dT=dT=dT=dA=dG=dA=M5C=MT=MG=MG=MA |
| 319 | CO-11509 | TGGAGAACCCTTTTTAGACT | 781 | MT=MG=MG=MA=MG=dA=dA=d5C=d5C=d5C=dT=dT=dT=dT=dT=MA=MG=MA=M5C=MT |
| 320 | CO-11510 | GTATGGAGAACCCTTTTTAG | 782 | MG=MT=MA=MT=MG=dG=dA=dG=dA=dA=d5C=d5C=d5C=dT=dT=MT=MT=MT=MA=MG |
| 321 | CO-11511 | GATATCTGTAGGTATGGAGA | 783 | MG=MA=MT=MA=MT=d5C=dT=dG=dT=dA=dG=dG=dT=dA=dT=MG=MG=MA=MG=MA |
| 322 | CO-11512 | TAAGATATCTGTAGGTATGG | 784 | MT=MA=MA=MG=MA=dT=dA=dT=d5C=dT=dG=dT=dA=dG=dG=MT=MA=MT=MG=MG |
| 323 | CO-11513 | AGTCTAAGATATCTGTAGGT | 785 | MA=MG=MT=M5C=MT=dA=dA=dG=dA=dT=dA=dT=d5C=dT=dG=MT=MA=MG=MG=MT |
| 324 | CO-11514 | GGACCTCTGTCTCTCTCTGG | 786 | MG=LG=MA=M5C=M5C=dT=d5C=dT=dG=dT=d5C=dT=d5C=dT=d5C=MT=M5C=MT=LG=MG |
| 325 | CO-11515 | GGACCTCTGTCTCTCTCTGG | 787 | MG=MG=MA=L5C=M5C=dT=d5C=dT=dG=dT=d5C=dT=d5C=dT=d5C=MT=L5C=MT=MG=MG |
| 326 | CO-11516 | GGACCTCTGTCTCTCTCTGG | 788 | MG=LG=MA=L5C=M5C=dT=d5C=dT=dG=dT=d5C=dT=d5C=dT=d5C=MT=L5C=MT=LG=MG |
| 327 | CO-11517 | GGACCTCTGTCTCTCTCTGG | 789 | LG=MG=MA=L5C=M5C=dT=d5C=dT=dG=dT=d5C=dT=d5C=dT=d5C=MT=L5C=MT=MG=LG |
| 328 | CO-11518 | GGACCTCTGTCTCTCTCTGG | 790 | MG=MG=MA-M5C-M5C=dT=d5C=dT=dG=dT=d5C=dT=d5C=dT=d5C=MT-M5C-MT=MG=MG |
| 329 | CO-11519 | GGACCTCTGTCTCTCTCTGG | 791 | MG=MG-MA-M5C-M5C=dT=d5C=dT=dG=dT=d5C=dT=d5C=dT=d5C=MT-M5C-MT-MG=MG |
| 330 | CO-11520 | GGACCTCTGTCTCTCTCTGG | 792 | MG-MG-MA-M5CM5C=dT=d5C=dT=dG=dT=d5C=dT=d5C=dT=d5C=MT-M5C-MT-MG-MG |
| 331 | CO-11521 | GGACCTCTGTCTCTCTCTGG | 793 | MG=MG-MA=M5C-M5C=dT=d5C=dT=dG=dT=d5C=dT=d5C=dT=d5C=MT-M5C=MT-MG=MG |
| 332 | CO-11522 | GGACCTCTGTCTCTCTCTGG | 794 | MG-MG=MA-M5C=M5C=dT=d5C=dT=dG=dT=d5C=dT=d5C=dT=d5C=MT=M5C-MT=MG=MG |
| 333 | CO-11523 | GGACCTCTGTCTCTCTCTGG | 795 | MG=MG=MA=M5C=M5C=dT=d5C=MT=dG=dT=M5C=dT=d5C=MT=d5C=MT=M5C=MT=MG=MG |
| 334 | CO-11524 | AGGACCTCTGTCTCTCTCTGGT | 796 | MA=MG=MG=MA=M5C=M5C=dT=d5C=dT=dG=dT=d5C=dT=d5C=dT=d5C=MT=M5C=MT=MG=MG=MT |
| 335 | CO-11525 | AGGACCTCTGTCTCTCTCTGGT | 797 | LA=MG=MG=LA=M5C=M5C=dT=d5C=dT=dG=dT=d5C=dT=d5C=dT=d5C=MT=M5C=LT=MG=MG=LT |
| 336 | CO-11526 | AGGACCTCTGTCTCTCTCTGGT | 798 | MA=MG=LG=MA=L5C=M5C=dT=d5C=dT=dG=dT=d5C=dT=d5C=dT=d5C=MT=L5C=MT=LG=MG=MT |
| 337 | CO-11527 | AGGACCTCTGTCTCTCTCTGGT | 799 | MA-MG=MG-MA=M5C-M5C=dT=d5C=dT=dG=dT=d5C=dT=d5C=dT=d5C=MT-M5C=MT-MG=MG=MT |
| 338 | CO-11528 | AGGACCTCTGTCTCTCTCTGGT | 800 | MA=MG-MG=MA-M5C=M5C=dT=d5C=dT=dG=dT=d5C=dT=d5C=dT=d5C=MT=M5C-MT=MG-MG=MT |
| 339 | CO-11529 | AGGACCTCTGTCTCTCTCTGGT | 801 | MA=MG-MG=MA=M5C-M5C=dT=d5C=dT=dG=dT=d5C=dT=d5C=dT=d5C=MT-M5C=MT=MG-MG=MT |
| 340 | CO-11530 | TAGGACCTCTGTCTCTCTCTGGTG | 802 | MT=MA=MG=MG=MA=M5C=M5C=dT=d5C=dT=dG=dT=d5C=dT=d5C=dT=d5C=MT=M5C=MT=MG=MG=MT=MG |
| 341 | CO-11531 | TAGGACCTCTGTCTCTCTCTGGTG | 803 | LT=MA=MG=LG=MA=M5C=M5C=dT=d5C=dT=dG=dT=d5C=dT=d5C=dT=d5C=MT=M5C=MT=LG=MG=MT=LG |
| 342 | CO-11532 | TAGGACCTCTGTCTCTCTCTGGTG | 804 | MT=MA=LG=MG=MA=L5C=M5C=dT=d5C=dT=dG=dT=d5C=dT=d5C=dT=d5C=MT=L5C=MT=MG=LG=MT=MG |
| 343 | CO-11533 | TAGGACCTCTGTCTCTCTCTGGTBG | 805 | MT=MA-MG=MG-MA=M5C-M5C=dT=d5C=dT=dG=dT=d5C=dT=d5C=dT=d5C=MT-M5C=MT-MG=MG-MT=MG |
| 344 | CO-11534 | TAGGACCTCTGTCTCTCTCTGGTG | 806 | MT-MA=MG-MG=MA-M5C=M5C=dT=d5C=dT=dG=dT=d5C=dT=d5C=dT=d5C=MT=M5C-MT=MG-MG=MT-MG |
| 345 | CO-11535 | TAGGACCTCTGTCTCTCTCTGGTG | 807 | MT=MA-MG=MG-MA=M5C=M5C=dT=d5C=dT=dG=dT=d5C=dT=d5C=dT=d5C=MT=M5C=MT-MG=MG-MT=MG |
| 346 | CO-11536 | GGCCCTGTGTCTCAAATTAC | 808 | MG=LG=M5C=M5C=M5C=dT=dG=dT=dG=dT=d5C=dT=d5C=dA=dA=MA=MT=MT=LA=M5C |
| 347 | CO-11537 | GGCCCTGTGTCTCAAATTAC | 809 | MG=MG=M5C=L5C=M5C=dT=dG=dT=dG=dT=d5C=dT=d5C=dA=dA=MA=LT=MT=MA=M5C |
| 348 | CO-11538 | GGCCCTGTGTCTCAAATTAC | 810 | MG=LG=M5C=L5C=M5C=dT=dG=dT=dG=dT=d5C=dT=d5C=dA=dA=MA=LT=MT=LA=M5C |
| 349 | CO-11539 | GGCCCTGTGTCTCAAATTAC | 811 | LG=MG=M5C=L5C=M5C=dT=dG=dT=dG=dT=d5C=dT=d5C=dA=dA=MA=LT=MT=MA=L5C |
| 350 | CO-11540 | GGCCCTGTGTCTCAAATTAC | 812 | MG=MG=M5C-M5C-M5C=dT=dG=dT=dG=dT=d5C=dT=d5C=dA=dA=MA-MT-MT=MA=M5C |
| 351 | CO-11541 | GGCCCTGTGTCTCAAATTAC | 813 | MG=MG-M5C-M5C-M5C=dT=dG=dT=dG=dT=d5C=dT=d5C=dA=dA=MA-MT-MT-MA=M5C |
| 352 | CO-11542 | GGCCCTGTGTCTCAAATTAC | 814 | MG-MG-M5C-M5C-M5C=dT=dG=dT=dG=dT=d5C=dT=d5C=dA=dA=MA-MT-MT-MA-M5C |
| 353 | CO-11543 | GGCCCTGTGTCTCAAATTAC | 815 | MG=MG-M5C=M5C-M5C=dT=dG=dT=dG=dT=d5C=dT=d5C=dA=dA=MA-MT=MT-MA=M5C |
| 354 | CO-11544 | GGCCCTGTGTCTCAAATTAC | 816 | MG-MG=M5C-M5C=M5C=dT=dG=dT=dG=dT=d5C=dT=d5C=dA=dA=MA=MT-MT=MA-M5C |
| 355 | CO-11545 | GGCCCTGTGTCTCAAATTAC | 817 | MG=MG=M5C=M5C=M5C=dT=dG=MT=dG=dT=M5C=dT=d5C=MA=dA=MA=MT=MT=MA=M5C |
| 356 | CO-11546 | TGGCCCTGTGTCTCAAATTACC | 818 | MT=MG=MG=M5C=M5C=M5C=dT=dG=dT=dG=dT=d5C=dT=d5C=dA=dA=MA=MT=MT=MA=M5C=M5C |
| 357 | CO-11547 | TGGCCCTGTGTCTCAAATTACC | 819 | LT=MG=MG=L5C=M5C=M5C=dT=dG=dT=dG=dT=d5C=dT=d5C=dA=dA=MA=MT=LT=MA=M5C=L5C |
| 358 | CO-11548 | TGGCCCTGTGTCTCAAATTACC | 820 | MT=MG=LG=M5C=L5C=M5C=dT=dG=dT=dG=dT=d5C=dT=d5C=dA=dA=MA=LT=MT=LA=M5C=M5C |
| 359 | CO-11549 | TGGCCCTGTGTCTCAAATTACC | 821 | MT-MG=MG-M5C=M5C-M5C=dT=dG=dT=dG=dT=d5C=dT=d5C=dA=dA=MA-MT=MT-MA=M5C=M5C |
| 360 | CO-11550 | TGGCCCTGTGTCTCAAATTACC | 822 | MT=MG-MG=M5C-M5C=M5C=dT=dG=dT=dG=dT=d5C=dT=d5C=dA=dA=MA=MT-MT=MA-M5C=M5C |
| 361 | CO-11551 | TGGCCCTGTGTCTCAAATTACC | 823 | MT=MG-MG=M5C=M5C-M5C=dT=dG=dT=dG=dT=d5C=dT=d5C=dA=dA=MA-MT=MT=MA-M5C=M5C |
| 362 | CO-11552 | TTGGCCCTGTGTCTCAAATTACCC | 824 | MT=MT=MG=MG=M5C=M5C=M5C=dT=dG=dT=dG=dT=d5C=dT=d5C=dA=dA=MA=MT=MT=MA=M5C=M5C=M5C |
| 363 | CO-11553 | TTGGCCCTGTGTCTCAAATTACCC | 825 | LT=MT=MG=LG=M5C=M5C=M5C=dT=dG=dT=dG=dT=d5C=dT=d5C=dA=dA=MA=MT=MT=LA=M5C=M5C=L5C |
| 364 | CO-11554 | TTGGCCCTGTGTCTCAAATTACCC | 826 | MT=MT=LG=MG=M5C=L5C=M5C=dT=dG=dT=dG=dT=d5C=dT=d5C=dA=dA=MA=LT=MT=MA=L5C=M5C=M5C |
| 365 | CO-11555 | TTGGCCCTGTGTCTCAAATTACCC | 827 | MT=MT-MG=MG-M5C=M5C-M5C=dT=dG=dT=dG=dT=d5C=dT=d5C=dA=dA=MA-MT=MT-MA=M5C-M5C=M5C |
| 366 | CO-11556 | TTGGCCCTGTGTCTCAAATTACCC | 828 | MT-MT=MG-MG=M5C-M5C=M5C=dT=dG=dT=dG=dT=d5C=dT=d5C=dA=dA=MA=MT-MT=MA-M5C=M5C-M5C |
| 367 | CO-11557 | TTGGCCCTGTGTCTCAAATTACCC | 829 | MT=MT-MG=MG-M5C=M5C=M5C=dT=dG=dT=dG=dT=d5C=dT=d5C=dA=dA=MA=MT=MT-MA=M5C- |
| | | | | M5C=M5C |
| 368 | CO-11558 | CTGTAGGTATGGAGAACCCT | 830 | M5C=LT=MG=MT=MA=dG=dG=dT=dA=dT=dG=dG=dA=dG=dA=MA=M5C=M5C=L 5C=MT |
| 369 | CO-11559 | CTGTAGGTATGGAGAACCCT | 831 | M5C=MT=MG=LT=MA=dG=dG=dT=dA=dT=dG=dG=dA=dG=dA=MA=L5C=M5C=M5C=MT |
| 370 | CO-11560 | CTGTAGGTATGGAGAACCCT | 832 | M5C=LT=MG=LT=MA=dG=dG=dT=dA=dT=dG=dG=dA=dG=dA=MA=L5C=M5C=L5C=MT |
| 371 | CO-11561 | CTGTAGGTATGGAGAACCCT | 833 | L5C=MT=MG=LT=MA=dG=dG=dT=dA=dT=dG=dG=dA=dG=dA=MA=L5C=M5C=M5C=LT |
| 372 | CO-11562 | CTGTAGGTATGGAGAACCCT | 834 | M5C=MT=MG-MT-MA=dG=dG=dT=dA=dT=dG=dG=dA=dG=dA=MA-M5C-M5C=M5C=MT |
| 373 | CO-11563 | CTGTAGGTATGGAGAACCCT | 835 | M5C=MT-MG-MT-MA=dG=dG=dT=dA=dT=dG=dG=dA=dG=dA=MA-M5C-M5C-M5C=MT |
| 374 | CO-11564 | CTGTAGGTATGGAGAACCCT | 836 | M5C-MT-MG-MT-MA=dG=dG=dT=dA=dT=dG=dG=dA=dG=dA=MA-M5C-M5C-M5C-MT |
| 375 | CO-11565 | CTGTAGGTATGGAGAACCCT | 837 | M5C=MT-MG=MT-MA=dG=dG=dT=dA=dT=dG=dG=dA=dG=dA=MA-M5C=M5C-M5C=MT |
| 376 | CO-11566 | CTGTAGGTATGGAGAACCCT | 838 | M5C-MT=MG-MT=MA=dG=dG=dT=dA=dT=dG=dG=dA=dG=dA=MA=M5C-M5C=M5C-MT |
| 377 | CO-11567 | CTGTAGGTATGGAGAACCCT | 839 | M5C=MT=MG=MT=MA=dG=dG=MT=dA=dT=MG=dG=dA=MG=dA=MA=M5C=M5C=M5C=MT |
| 378 | CO-11568 | TCTGTAGGTATGGAGAACCCTT | 840 | MT=M5C=MT=MG=MT=MA=dG=dG=dT=dA=dT=dG=dG=dA=dG=dA=MA=M5C=M5C=M5C=MT=MT |
| 379 | CO-11569 | TCTGTAGGTATGGAGAACCCTT | 841 | LT=M5C=MT=LG=MT=MA=dG=dG=dT=dA=dT=dG=dG=dA=dG=dA=MA=M5C=L5C=M5C=MT=LT |
| 380 | CO-11570 | TCTGTAGGTATGGAGAACCCTT | 842 | MT=M5C=LT=MG=LT=MA=dG=dG=dT=dA=dT=dG=dG=dA=dG=dA=MA=L5C=M5C=L5C=MT=MT |
| 381 | CO-11571 | TCTGTAGGTATGGAGAACCCTT | 843 | MT-M5C=MT-MG=MT-MA=dG=dG=dT=dA=dT=dG=dG=dA=dG=dA=MA-M5C=M5C-M5C=MT-MT |
| 382 | CO-11572 | TCTGTAGGTATGGAGAACCCTT | 844 | MT=M5C-MT=MG-MT=MA=dG=dG=dT=dA=dT=dG=dG=dA=dG=dA=MA=M5C-M5C=M5C-MT=MT |
| 383 | CO-11573 | TCTGTAGGTATGGAGAACCCTT | 845 | MT=M5C-MT=MG=MT-MA=dG=dG=dT=dA=dT=dG=dG=dA=dG=dA=MA-M5C=M5C=M5C-MT=MT |
| 384 | CO-11574 | ATCTGTAGGTATGGAGAACCCTTT | 846 | MA=MT=M5C=MT=MG=MT=MA=dG=dG=dT=dA=dT=dG=dG=dA=dG=dA=MA=M5C=M5C=M5C=MT=MT=MT |
| 385 | CO-11575 | ATCTGTAGGTATGGAGAACCCTTT | 847 | LA=MT=M5C=LT=MG=MT=MA=dG=dG=dT=dA=dT=dG=dG=dA=dG=dA=MA=M5C=M5C=L5C=MT=MT=LT |
| 386 | CO-11576 | ATCTGTAGGTATGGAGAACCCTTT | 848 | MA=MT=L5C=MT=MG=LT=MA=dG=dG=dT=dA=dT=dG=dG=dA=dG=dA=MA=L5C=M5C=M5C=LT=MT=MT |
| 387 | CO-11577 | ATCTGTAGGTATGGAGAACCCTTT | 849 | MA=MT-M5C=MT-MG=MT-MA=dG=dG=dT=dA=dT=dG=dG=dA=dG=dA=MA-M5C=M5C-M5C=MT-MT=MT |
| 388 | CO-11578 | ATCTGTAGGTATGGAGAACCCTTT | 850 | MA-MT=M5C-MT=MG-MT=MA=dG=dG=dT=dA=dT=dG=dG=dA=dG=dA=MA=M5C-M5C=M5C-MT=MT-MT |
| 389 | CO-11579 | ATCTGTAGGTATGGAGAACCCTTT | 851 | MA=MT-M5C=MT-MG=MT=MA=dG=dG=dT=dA=dT=dG=dG=dA=dG=dA=MA=M5C=M5C-M5C=MT-MT=MT |
| 390 | CO-12331 | CTTTCTCTGTGGGTCTAGGG | 852 | M5C=MT=MT=LT=M5C=dT=d5C=dT=dG=dT=dG=dG=dG=dT=d5C=MT=LA=MG=MG=MG |
| 391 | CO-12332 | CTTTCTCTGTGGGTCTAGGG | 853 | M5C=MT=LT=MT=M5C=dT=d5C=dT=dG=dT=dG=dG=dG=dT=d5C=MT=MA=LG=MG=MG |
| 392 | CO-12333 | CTTTCTCTGTGGGTCTAGGG | 854 | M5C=LT=MT=MT=M5C=dT=d5C=dT=dG=dT=dG=dG=dG=dT=d5C=MT=MA=MG=LG=MG |
| 393 | CO-12334 | CTTTCTCTGTGGGTCTAGGG | 855 | M5C=LT=MT=LT=M5C=dT=d5C=dT=dG=dT=dG=dG=dG=dT=d5C=MT=LA=MG=LG=MG |
| 394 | CO-12335 | CTTTCTCTGTGGGTCTAGGG | 856 | L5C=MT=MT=LT=M5C=dT=d5C=dT=dG=dT=dG=dG=dG=dT=d5C=MT=LA=MG=MG=LG |
| 395 | CO-12336 | CTTTCTCTGTGGGTCTAGGG | 857 | L5C=MT=LT=MT=M5C=dT=d5C=dT=dG=dT=dG=dG=dG=dT=d5C=MT=MA=LG=MG=LG |
| 396 | CO-12337 | CTTTCTCTGTGGGTCTAGGG | 858 | M5C=MT=LT=MT=L5C=dT=d5C=dT=dG=dT=dG=dG=dG=dT=d5C=LT=MA=LG=MG=MG |
| 397 | CO-12338 | CTTTCTCTGTGGGTCTAGGG | 859 | M5C=MT=MT=MT=M5C=dT=d5C=MT=dG=dT=MG=dG=dG=MT=d5C=MT=MA=MG=MG=MG |
| 398 | CO-12339 | CTTTCTCTGTGGGTCTAGGG | 860 | M5C=LT=MT=LT=M5C=dT=d5C=MT=dG=dT=MG=dG=dG=MT=d5C=MT=LA=MG=LG=MG |
| 399 | CO-12340 | CTTTCTCTGTGGGTCTAGGG | 861 | M5C=MT=MT-MT-M5C=dT=d5C=dT=dG=dT=dG=dG=dG=dT=d5C=MT-MA-MG=MG=MG |
| 400 | CO-12341 | CTTTCTCTGTGGGTCTAGGG | 862 | M5C=MT-MT-MT-M5C=dT=d5C=dT=dG=dT=dG=dG=dG=dT=d5C=MT-MA-MG-MG=MG |
| 401 | CO-12342 | CTTTCTCTGTGGGTCTAGGG | 863 | M5C-MT-MT-MT-M5C=dT=d5C=dT=dG=dT=dG=dG=dG=dT=d5C=MT-MA-MG-MG-MG |
| 402 | CO-12343 | CTTTCTCTGTGGGTCTAGGG | 864 | M5C=MT-MT=MT-M5C=dT=d5C=dT=dG=dT=dG=dG=dG=dT=d5C=MT-MA=MG-MG=MG |
| 403 | CO-12344 | CTTTCTCTGTGGGTCTAGGG | 865 | M5C-MT=MT-MT=M5C=dT=d5C=dT=dG=dT=dG=dG=dG=dT=d5C=MT=MA-MG=MG-MG |
| 404 | CO-12345 | TCTTTCTCTGTGGGTCTAGGGT | 866 | MT=M5C=MT=MT=MT=M5C=dT=d5C=dT=dG=dT=dG=dG=dG=dT=d5C=MT=MA=MG=MG=MG=MT |
| 405 | CO-12346 | TCTTTCTCTGTGGGTCTAGGGT | 867 | LT=M5C=MT=LT=MT=M5C=dT=d5C=dT=dG=dT=dG=dG=dG=dT=d5C=MT=MA=LG=MG=MG=MT |
| 406 | CO-12347 | TCTTTCTCTGTGGGTCTAGGGT | 868 | MT=M5C=LT=MT=LT=M5C=dT=d5C=dT=dG=dT=dG=dG=dG=dT=d5C=MT=LA=MG=LG=MG=MT |
| 407 | CO-12348 | TCTTTCTCTGTGGGTCTAGGGT | 869 | MT-M5C=MT-MT=MT-M5C=dT=d5C=dT=dG=dT=dG=dG=dG=dT=d5C=MT-MA=MG-MG=MG-MT |
| 408 | CO-12349 | TCTTTCTCTGTGGGTCTAGGGT | 870 | MT=M5C-MT=MT-MT=M5C=dT=d5C=dT=dG=dT=dG=dG=dG=dT=d5C=MT=MA-MG=MG-MG=MT |
| 409 | CO-12350 | TCTTTCTCTGTGGGTCTAGGGT | 871 | MT=M5C-MT=MT=MT-M5C=dT=d5C=dT=dG=dT=dG=dG=dG=dT=d5C=MT-MA=MG=MG-MG=MT |
| 410 | CO-12351 | ATCTTTCTCTGTGGGTCTAGGGTC | 872 | MA=MT=M5C=MT=MT=MT=M5C=dT=d5C=dT=dG=dT=dG=dG=dG=dT=d5C=MT=MA=MG=MG=MG=MT=M5C |
| 411 | CO-12352 | ATCTTTCTCTGTGGGTCTAGGGTC | 873 | LA=MT=M5C=LT=MT=MT=M5C=dT=d5C=dT=dG=dT=dG=dG=dG=dT=d5C=MT=MA=MG=LG=MG=MT=L5C |
| 412 | CO-12353 | ATCTTTCTCTGTGGGTCTAGGGTC | 874 | MA=MT=L5C=MT=MT=LT=M5C=dT=d5C=dT=dG=dT=dG=dG=dG=dT=d5C=MT=LA=MG=MG=LG=MT=M5C |
| 413 | CO-12354 | ATCTTTCTCTGTGGGTCTAGGGTC | 875 | MA=MT-M5C=MT-MT=MT-M5C=dT=d5C=dT=dG=dT=dG=dG=dG=dT=d5C=MT-MA=MG-MG=MG-MT=M5C |
| 414 | CO-12355 | ATCTTTCTCTGTGGGTCTAGGGTC | 876 | MA-MT=M5C-MT=MT-MT=M5C=dT=d5C=dT=dG=dT=dG=dG=dG=dT=d5C=MT=MA-MG=MG-MG=MT-M5C |
| 415 | CO-12356 | ATCTTTCTCTGTGGGTCTAGGGTC | 877 | MA=MT-M5C=MT-MT=MT=M5C=dT=d5C=dT=dG=dT=dG=dG=dG=dT=d5C=MT=MA=MG-MG=MG-MT=M5C |
| 416 | CO-15399 | GGACCTCTGTCTCTCTCTGG | 878 | MG=MG=MA=M5C=M5C=dT=d5C=dT=dG=dT=d5C=dT=d5C=dT=d5C=MT=M5C=MT=MG=MG=dSp=dSp= |
| | | | | dSp=dSp=dSp=dSp=dSp=dSp=dSp=dSp=dSp=dSp=dSp=dSp=dSp=dSp=dSp=dSp=dSp=dSp= |
| 417 | CO-15400 | CTGTAGGTATGGAGAACCCT | 879 | M5C=MT=MG=MT=MA=dG=dG=dT=dA=dT=dG=dG=dA=dG=dA=MA=M5C=M5C=M5C=MT=dSp=dSp=dSp= |
| | | | | dSp=dSp=dSp=dSp=dSp=dSp=dSp=dSp=dSp=dSp=dSp=dSp=dsp=dSp=dSp=dSp=dSp |
| 418 | CO-15523 | CTGTAGGTATGGAGAACCCT | 880 | M5C=MT=MG=MT=LA=dG=dG=dT=dA=dT=dG=dG=dA=dG=dA=LA=M5C=M5C=M5C=MT |
| 419 | CO-15524 | CTGTAGGTATGGAGAACCCT | 881 | M5C=MT=LG=MT=MA=dG=dG=dT=dA=dT=dG=dG=dA=dG=dA=MA=M5C=L5C=M5C=MT |
| 420 | CO-15525 | CTGTAGGTATGGAGAACCCT | 882 | L5C=MT=MG=MT=MA=dG=dG=dT=dA=dT=dG=dG=dA=dG=dA=MA=M5C=M5C=M5C=LT |
| 421 | CO-15526 | CTGTAGGTATGGAGAACCCT | 883 | M5C=MT=LG=MT=LA=dG=dG=dT=dA=dT=dG=dG=dA=dG=dA=LA=M5C=L5C=M5C=MT |
| 422 | CO-15527 | CTGTAGGTATGGAGAACCCT | 884 | L5C=MT=LG=MT=MA=dG=dG=dT=dA=dT=dG=dG=dA=dG=dA=MA=M5C=L5C=M5C=LT |
| 423 | CO-15528 | CTGTAGGTATGGAGAACCCT | 885 | L5C=MT=LG=MT=LA=dG=dG=dT=dA=dT=dG=dG=dA=dG=dA=LA=M5C=L5C=M5C=LT |
| 424 | CO-15529 | GGACCTCTGTCTCTCTCTGG | 886 | MG=MG=MA=M5C=L5C=dT=d5C=dT=dG=dT=d5C=dT=d5C=dT=d5C=LT=M5C=MT=MG=MG |
| 425 | CO-15530 | GGACCTCTGTCTCTCTCTGG | 887 | MG=MG=LA=M5C=M5C=dT=d5C=dT=dG=dT=d5C=dT=d5C=dT=d5C=MT=M5C=LT=MG=MG |
| 426 | CO-15531 | GGACCTCTGTCTCTCTCTGG | 888 | LG=MG=MA=M5C=M5C=dT=d5C=dT=dG=dT=d5C=dT=d5C=dT=d5C=MT=M5C=MT=MG=LG |
| 427 | CO-15532 | GGACCTCTGTCTCTCTCTGG | 889 | MG=MG=LA=M5C=L5C=dT=d5C=dT=dG=dT=d5C=dT=d5C=dT=d5C=LT=M5C=LT=MG=MG |
| 428 | CO-15533 | GGACCTCTGTCTCTCTCTGG | 890 | LG=MG=LA=M5C=M5C=dT=d5C=dT=dG=dT=d5C=dT=d5C=dT=d5C=MT=M5C=LT=MG=LG |
| 429 | CO-15534 | GGACCTCTGTCTCTCTCTGG | 891 | LG=MG=LA=M5C=L5C=dT=d5C=dT=dG=dT=d5C=dT=d5C=dT=d5C=LT=M5C=LT=MG=LG |
| 430 | CO-16535 | GGCTCTTATTCTCCTCCTCC | 892 | MG=MG=M5C=MT=M5C=MT=MT=MA=MT=MT=M5C=MT=M5C=M5C=MT=M5C=M5C=MT=M5C=M5C |
| 431 | CO-16536 | TTGGCTCTTATTCTCCTCCT | 893 | MT=MT=MG=MG=M5C=MT=M5C=MT=MT=MA=MT=MT=M5C=MT=M5C=M5C=MT=M5C=M5C=MT |
| 432 | CO-16537 | CCGTTGGCTCTTATTCTCCT | 894 | M5C=M5C=MG=MT=MT=MG=MG=M5C=MT=M5C=MT=MT=MA=MT=MT=M5C=MT=M5C=M5C=MT |
| 433 | CO-16538 | TGCCGTTGGCTCTTATTCTC | 895 | MT=MG=M5C=M5C=MG=MT=MT=MG=MG=M5C=MT=M5C=MT=MT=MA=MT=MT=M5C=MT=M5C |
| 434 | CO-16539 | GCTGCCGTTGGCTCTTATTC | 896 | MG=M5C=MT=MG=M5C=M5C=MG=MT=MT=MG=MG=M5C=MT=M5C=MT=MT=MA=MT=MT=M5C |
| 435 | CO-16540 | CTGCTGCCGTTGGCTCTTAT | 897 | M5C=MT=MG=M5C=MT=MG=M5C=M5C=MG=MT=MT=MG=MG=M5C=MT=M5C=MT=MT=MA=MT |
| 436 | CO-16541 | CGCTGCTGCCGTTGGCTCTT | 898 | M5C=MG=M5C=MT=MG=M5C=MT=MG=M5C=M5C=MG=MT=MT=MG=MG=M5C=MT=M5C=MT=MT |
| 437 | CO-16542 | GGCTCTTATTCTCCTCCTCC | 899 | MG=MG=M5C=MT=M5C=dT=dT=dA=dT=dT=d5C=dT=d5C=d5C=dT=M5C=M5C=MT=M5C=M5C |
| 438 | CO-16543 | TTGGCTCTTATTCTCCTCCT | 900 | MT=MT=MG=MG=M5C=dT=d5C=dT=dT=dA=dT=dT=d5C=dT=d5C=M5C=MT=M5C=M5C=MT |
| 439 | CO-16544 | CCGTTGGCTCTTATTCTCCT | 901 | M5C=M5C=MG=MT=MT=dG=dG=d5C=dT=d5C=dT=dT=dA=dT=dT=M5C=MT=M5C=M5C=MT |
| 440 | CO-16545 | TGCCGTTGGCTCTTATTCTC | 902 | MT=MG=M5C=M5C=MG=dT=dT=dG=dG=d5C=dT=d5C=dT=dT=dA=MT=MT=M5C=MT=M5C |
| 441 | CO-16546 | GCTGCCGTTGGCTCTTATTC | 903 | MG=M5C=MT=MG=M5C=d5C=dG=dT=dT=dG=dG=d5C=dT=d5C=dT=MT=MA=MT=MT=M5C |
| 442 | CO-16547 | CTGCTGCCGTTGGCTCTTAT | 904 | M5C=MT=MG=M5C=MT=dG=d5C=d5C=dG=dT=dT=dG=dG=d5C=dT=M5C=MT=MT=MA=MT |
| 443 | CO-16548 | CGCTGCTGCCGTTGGCTCTT | 905 | M5C=MG=M5C=MT=MG=d5C=dT=dG=d5C=d5C=dG=dT=dT=dG=dG=M5C=MT=M5C=MT=MT |
| 444 | CO-17739 | CTGGTGTGTTTTTGAGTCAG | 906 | M5C=MT=MG=MG=MT=dG=dT=dG=dT=dT=dT=dT=dT=dG=dA=MG=MT=M5C=MA=MG |
| 445 | CO-17740 | TCTGGTGTGTTTTTGAGTCA | 907 | MT=M5C=MT=MG=MG=dT=dG=dT=dG=dT=dT=dT=dT=dT=dG=MA=MG=MT=M5C=MA |
| 446 | CO-17741 | TCTCTGGTGTGTTTTTGAGT | 908 | MT=M5C=MT=M5C=MT=dG=dG=dT=dG=dT=dG=dT=dT=dT=dT=MT=MG=MA=MG=MT |
| 447 | CO-17742 | ATCTTTAGGACCTCTGTCTC | 909 | MA=MT=M5C=MT=MT=dT=dA=dG=dG=dA=d5C=d5C=dT=d5C=dT=MG=MT=M5C=MT=M5C |
| 448 | CO-17743 | GGTCTGCATCTTTAGGACCT | 910 | MG=MG=MT=M5C=MT=dG=d5C=dA=dT=d5C=dT=dT=dT=dA=dG=MG=MA=M5C=M5C=MT |
| 449 | CO-17744 | GGGTCTGCATCTTTAGGACC | 911 | MG=MG=MG=MT=M5C=dT=dG=d5C=dA=dT=d5C=dT=dT=dT=dA=MG=MG=MA=M5C=M5C |
| 450 | CO-17745 | TCTAGGGTCTCTCTGTCTCA | 912 | MT=M5C=MT=MA=MG=dG=dG=dT=d5C=dT=d5C=dT=d5C=dT=dG=MT=M5C=MT=M5C=MA |
| 451 | CO-17746 | GGGTCTAGGGTCTCTCTGTC | 913 | MG=MG=MG=MT=M5C=dT=dA=dG=dG=dG=dT=d5C=dT=d5C=dT=M5C=MT=MG=MT=M5C |
| 452 | CO-17747 | GTGGGTCTAGGGTCTCTCTG | 914 | MG=MT=MG=MG=MG=dT=d5C=dT=dA=dG=dG=dG=dT=d5C=dT=M5C=MT=M5C=MT=MG |
| 453 | CO-17748 | TCTGTGGGTCTAGGGTCTCT | 915 | MT=M5C=MT=MG=MT=dG=dG=dG=dT=d5C=dT=dA=dG=dG=dG=MT=M5C=MT=M5C=MT |
| 454 | CO-17749 | TCTCTGTGGGTCTAGGGTCT | 916 | MT=M5C=MT=M5C=MT=dG=dT=dG=dG=dG=dT=d5C=dT=dA=dG=MG=MG=MT=M5C=MT |
| 455 | CO-17750 | TTTCTCTGTGGGTCTAGGGT | 917 | MT=MT=MT=M5C=MT=d5C=dT=dG=dT=dG=dG=dG=dT=d5C=dT=MA=MG=MG=MG=MT |
| 456 | CO-17751 | TGAAGTATCTTTCTCTGTGG | 918 | MT=MG=MA=MA=MG=dT=dA=dT=d5C=dT=dT=dT=d5C=dT=d5C=MT=MG=MT=MG=MG |
| 457 | CO-17752 | GGTGAAGTATCTTTCTCTGT | 919 | MG=MG=MT=MG=MA=dA=dG=dT=dA=dT=d5C=dT=dT=dT=d5C=MT=M5C=MT=MG=MT |
| 458 | CO-17753 | GTGGTGAAGTATCTTTCTCT | 920 | MG=MT=MG=MG=MT=dG=dA=dA=dG=dT=dA=dT=d5C=dT=dT=MT=M5C=MT=M5C=MT |
| 459 | CO-17754 | TCAAATTACCCCACAGTGGG | 921 | MT=M5C=MA=MA=MA=dT=dT=dA=d5C=d5C=d5C=d5C=dA=d5C=dA=MG=MT=MG=MG=MG |
| 460 | CO-17755 | TCTCAAATTACCCCACAGTG | 922 | MT=M5C=MT=M5C=MA=dA=dA=dT=dT=dA=d5C=d5C=d5C=d5C=dA=M5C=MA=MG=MT=MG |
| 461 | CO-17756 | TGTCTCAAATTACCCCACAG | 923 | MT=MG=MT=M5C=MT=d5C=dA=dA=dA=dT=dT=dA=d5C=d5C=d5C=M5C=MA=M5C=MA=MG |
| 462 | CO-17757 | TGTGTCTCAAATTACCCCAC | 924 | MT=MG=MT=MG=MT=d5C=dT=d5C=dA=dA=dA=dT=dT=dA=d5C=M5C=M5C=M5C=MA=M5C |
| 463 | CO-17758 | CCTGTGTCTCAAATTACCCC | 925 | M5C=M5C=MT=MG=MT=dG=dT=d5C=dT=d5C=dA=dA=dA=dT=dT=MA=M5C=M5C=M5C=M5C |
| 464 | CO-17759 | GCCCTGTGTCTCAAATTACC | 926 | MG=M5C=M5C=M5C=MT=dG=dT=dG=dT=d5C=dT=d5C=dA=dA=dA=MT=MT=MA=M5C=M5C |
| 465 | CO-17760 | TTTGGCCCTGTGTCTCAAAT | 927 | MT=MT=MT=MG=MG=d5C=d5C=d5C=dT=dG=dT=dG=dT=d5C=dT=M5C=MA=MA=MA=MT |
| 466 | CO-17761 | ATTTTGGCCCTGTGTCTCAA | 928 | MA=MT=MT=MT=MT=dG=dG=d5C=d5C=d5C=dT=dG=dT=dG=dT=M5C=MT=M5C=MA=MA |
| 467 | CO-17762 | TCTAGATTTTGGCCCTGTGT | 929 | MT=M5C=MT=MA=MG=dA=dT=dT=dT=dT=dG=dG=d5C=d5C=d5C=MT=MG=MT=MG=MT |
| 468 | CO-17763 | CTCTAGATTTTGGCCCTGTG | 930 | M5C=MT=M5C=MT=MA=dG=dA=dT=dT=dT=dT=dG=dG=d5C=d5C=M5C=MT=MG=MT=MG |
| 469 | CO-17764 | TCCTCTAGATTTTGGCCCTG | 931 | MT=M5C=M5C=MT=M5C=dT=dA=dG=dA=dT=dT=dT=dT=dG=dG=M5C=M5C=M5C=MT=MG |
| 470 | CO-17765 | TTTTCCTCTAGATTTTGGCC | 932 | MT=MT=MT=MT=M5C=d5C=dT=d5C=dT=dA=dG=dA=dT=dT=dT=MT=MG=MG=M5C=M5C |
| 471 | CO-17766 | TTTTAGACTGGATTTTCAGA | 933 | MT=MT=MT=MT=MA=dG=dA=d5C=dT=dG=dG=dA=dT=dT=dT=MT=M5C=MA=MG=MA |
| 472 | CO-17767 | CCCTTTTTAGACTGGATTTT | 934 | M5C=M5C=M5C=MT=MT=dT=dT=dT=dA=dG=dA=d5C=dT=dG=dG=MA=MT=MT=MT=MT |
| 473 | CO-17768 | AACCCTTTTTAGACTGGATT | 935 | MA=MA=M5C=M5C=M5C=dT=dT=dT=dT=dT=dA=dG=dA=d5C=dT=MG=MG=MA=MT=MT |
| 474 | CO-17769 | GAACCCTTTTTAGACTGGAT | 936 | MG=MA=MA=M5C=M5C=d5C=dT=dT=dT=dT=dT=dA=dG=dA=d5C=MT=MG=MG=MA=MT |
| 475 | CO-17770 | GAGAACCCTTTTTAGACTGG | 937 | MG=MA=MG=MA=MA=d5C=d5C=d5C=dT=dT=dT=dT=dT=dA=dG=MA=M5C=MT=MG=MG |
| 476 | CO-17771 | GGAGAACCCTTTTTAGACTG | 938 | MG=MG=MA=MG=MA=dA=d5C=d5C=d5C=dT=dT=dT=dT=dT=dA=MG=MA=M5C=MT=MG |
| 477 | CO-17772 | ATGGAGAACCCTTTTTAGAC | 939 | MA=MT=MG=MG=MA=dG=dA=dA=d5C=d5C=d5C=dT=dT=dT=dT=MT=MA=MG=MA=M5C |
| 478 | CO-17773 | TATGGAGAACCCTTTTTAGA | 940 | MT=MA=MT=MG=MG=dA=dG=dA=dA=d5C=d5C=d5C=dT=dT=dT=MT=MT=MA=MG=MA |
| 479 | CO-17774 | GGTATGGAGAACCCTTTTTA | 941 | MG=MG=MT=MA=MT=dG=dG=dA=dG=dA=dA=d5C=d5C=d5C=dT=MT=MT=MT=MT=MA |
| 480 | CO-17775 | AGGTATGGAGAACCCTTTTT | 942 | MA=MG=MG=MT=MA=dT=dG=dG=dA=dG=dA=dA=d5C=d5C=d5C=MT=MT=MT=MT=MT |
| 481 | CO-17776 | TGTAGGTATGGAGAACCCTT | 943 | MT=MG=MT=MA=MG=dG=dT=dA=dT=dG=dG=dA=dG=dA=dA=M5C=M5C=M5C=MT=MT |
| 482 | CO-17777 | ATATCTGTAGGTATGGAGAA | 944 | MA=MT=MA=MT=M5C=dT=dG=dT=dA=dG=dG=dT=dA=dT=dG=MG=MA=MG=MA=MA |
| 483 | CO-17778 | AGATATCTGTAGGTATGGAG | 945 | MA=MG=MA=MT=MA=dT=d5C=dT=dG=dT=dA=dG=dG=dT=dA=MT=MG=MG=MA=MG |
| 484 | CO-17779 | AAGATATCTGTAGGTATGGA | 946 | MA=MA=MG=MA=MT=dA=dT=d5C=dT=dG=dT=dA=dG=dG=dT=MA=MT=MG=MG=MA |
| 485 | CO-17780 | CTAAGATATCTGTAGGTATG | 947 | M5C=MT=MA=MA=MG=dA=dT=dA=dT=d5C=dT=dG=dT=dA=dG=MG=MT=MA=MT=MG |
| 486 | CO-17781 | TCTAAGATATCTGTAGGTAT | 948 | MT=M5C=MT=MA=MA=dG=dA=dT=dA=dT=d5C=dT=dG=dT=dA=MG=MG=MT=MA=MT |
| 487 | CO-17782 | GTCTAAGATATCTGTAGGTA | 949 | MG=MT=M5C=MT=MA=dA=dG=dA=dT=dA=dT=d5C=dT=dG=dT=MA=MG=MG=MT=MA |
| 488 | CO-17783 | GAGTCTAAGATATCTGTAGG | 950 | MG=MA=MG=MT=M5C=dT=dA=dA=dG=dA=dT=dA=dT=d5C=dT=MG=MT=MA=MG=MG |
| 489 | CO-17784 | TGGAGTCTAAGATATCTGTA | 951 | MT=MG=MG=MA=MG=dT=d5C=dT=dA=dA=dG=dA=dT=dA=dT=M5C=MT=MG=MT=MA |
| 490 | CO-17785 | CTGGAGTCTAAGATATCTGT | 952 | M5C=MT=MG=MG=MA=dG=dT=d5C=dT=dA=dA=dG=dA=dT=dA=MT=M5C=MT=MG=MT |
| 491 | CO-17786 | TCTGGAGTCTAAGATATCTG | 953 | MT=M5C=MT=MG=MG=dA=dG=dT=d5C=dT=dA=dA=dG=dA=dT=MA=MT=M5C=MT=MG |
| 492 | CO-17787 | GTCTGGAGTCTAAGATATCT | 954 | MG=MT=M5C=MT=MG=dG=dA=dG=dT=d5C=dT=dA=dA=dG=dA=MT=MA=MT=M5C=MT |
| 493 | CO-17788 | GGTCTGGAGTCTAAGATATC | 955 | MG=MG=MT=M5C=MT=dG=dG=dA=dG=dT=d5C=dT=dA=dA=dG=MA=MT=MA=MT=M5C |
| 494 | CO-17789 | GGGTCTGGAGTCTAAGATAT | 956 | MG=MG=MG=MT=M5C=dT=dG=dG=dA=dG=dT=d5C=dT=dA=dA=MG=MA=MT=MA=MT |
| 495 | CO-18344 | CTTTCTCTGTGGGTCTAGGG | 957 | M5C=MT=MT=LT=M5C=dT=d5C=dT=dG=dT=dG=dG=dG=dT=d5C=MT=MA=MG=MG=MG |
| 496 | CO-18345 | CTTTCTCTGTGGGTCTAGGG | 958 | M5C=MT=MT=MT=M5C=dT=d5C=dT=dG=dT=dG=dG=dG=dT=d5C=MT=LA=MG=MG=MG |
| 497 | CO-18346 | CTTTCTCTGTGGGTCTAGGG | 959 | M5C=MT=MT=MT=L5C=dT=d5C=dT=dG=dT=dG=dG=dG=dT=d5C=LT=MA=MG=MG=MG |
| 498 | CO-18347 | CTTTCTCTGTGGGTCTAGGG | 960 | M5C=MT=MT=MT=L5C=dT=d5C=dT=dG=dT=dG=dG=dG=dT=d5C=MT=MA=MG=MG=MG |
| 499 | CO-18348 | CTTTCTCTGTGGGTCTAGGG | 961 | M5C=MT=MT=MT=M5C=dT=d5C=dT=dG=dT=dG=dG=dG=dT=d5C=LT=MA=MG=MG=MG |
| 500 | CO-18349 | CTTTCTCTGTGGGTCTAGGG | 962 | M5C=MT=MT=LT=L5C=dT=d5C=dT=dG=dT=dG=dG=dG=dT=d5C=MT=MA=MG=MG=MG |
| 501 | CO-18350 | CTTTCTCTGTGGGTCTAGGG | 963 | M5C=MT=MT=MT=M5C=dT=d5C=dT=dG=dT=dG=dG=dG=dT=d5C=LT=LA=MG=MG=MG |
| 502 | CO-18351 | CTTTCTCTGTGGGTCTAG | 964 | M5C=MT=MT=MT=M5C=dT=d5C=dT=dG=dT=dG=dG=dG=dT=d5C=MT=MA=MG |
| 503 | CO-18352 | CTTTCTCTGTGGGTCTAG | 965 | M5C=MT=MT=LT=M5C=dT=d5C=dT=dG=dT=dG=dG=dG=dT=d5C=MT=LA=MG |
| 504 | CO-18353 | CTTTCTCTGTGGGTCTAG | 966 | M5C=MT=MT=LT=M5C=dT=d5C=dT=dG=dT=dG=dG=dG=dT=d5C=MT=MA=MG |
| 505 | CO-18354 | CTTTCTCTGTGGGTCTAG | 967 | M5C=MT=MT=MT=M5C=dT=d5C=dT=dG=dT=dG=dG=dG=dT=d5C=MT=LA=MG |
| 506 | CO-18355 | CTTTCTCTGTGGGTCTAG | 968 | M5C=MT=MT=MT=L5C=dT=d5C=dT=dG=dT=dG=dG=dG=dT=d5C=LT=MA=MG |
| 507 | CO-18356 | CTTTCTCTGTGGGTCTAG | 969 | M5C=MT=MT=MT=L5C=dT=d5C=dT=dG=dT=dG=dG=dG=dT=d5C=MT=MA=MG |
| 508 | CO-18357 | CTTTCTCTGTGGGTCTAG | 970 | M5C=MT=MT=MT=M5C=dT=d5C=dT=dG=dT=dG=dG=dG=dT=d5C=LT=MA=MG |
| 509 | CO-18358 | CTTTCTCTGTGGGTCTAG | 971 | M5C=MT=MT=LT=L5C=dT=d5C=dT=dG=dT=dG=dG=dG=dT=d5C=MT=MA=MG |
| 510 | CO-18359 | CTTTCTCTGTGGGTCTAG | 972 | M5C=MT=MT=MT=M5C=dT=d5C=dT=dG=dT=dG=dG=dG=dT=d5C=LT=LA=MG |
| 511 | CO-18360 | TCTTTCTCTGTGGGTCTAGG | 973 | MT=M5C=MT=MT=MT=M5C=dT=d5C=dT=dG=dT=dG=dG=dG=dT=d5C=MT=MA=MG=MG |
| 512 | CO-18361 | ATCTTTCTCTGTGGGTCTAG | 974 | MA=MT=M5C=MT=MT=MT=M5C=dT=d5C=dT=dG=dT=dG=dG=dG=dT=d5C=MT=MA=MG |
| 513 | CO-18362 | TTTCTCTGTGGGTCTAGGGT | 975 | MT=MT=MT=M5C=dT=d5C=dT=dG=dT=dG=dG=dG=dT=d5C=MT=MA=MG=MG=MG=MT |
| 514 | CO-18363 | TTCTCTGTGGGTCTAGGGTC | 976 | MT=MT=M5C=dT=d5C=dT=dG=dT=dG=dG=dG=dT=d5C=MT=MA=MG=MG=MG=MT=M5C |
| 515 | CO-18365 | GACCTCTGTCTCTCTCTG | 977 | MG=MA=M5C=M5C=dT=d5C=dT=dG=dT=d5C=dT=d5C=dT=d5C=MT=M5C=MT=MG |
| 516 | CO-18366 | TTAGGACCTCTGTCTCTCTCTGGTGT | 978 | MT=MT=MA=MG=MG=MA=M5C=M5C=dT=d5C=dT=dG=dT=d5C=dT=d5C=dT=d5C=MT=M5C=MT=MG=MG= |
| | | | | MT=MG=MT |
| 517 | CO-18367 | AGGACCTCTGTCTCTCTCTGGT | 979 | MA=MG=MG=MA-M5C=M5C=dT=d5C=dT=dG=dT=d5C=dT=d5C=dT=d5C=MT=M5C-MT=MG=MG=MT |
| 518 | CO-18368 | AGGACCTCTGTCTCTCTCTGGT | 980 | MA=MG=MG=MA=M5C=M5C=dT=d5C=dT=dG=dT=d5C=dT=d5C=dT=d5C=MT=M5C-MT=MG=MG=MT |
| 519 | CO-18369 | AGGACCTCTGTCTCTCTCTGGT | 981 | MA=MG=MG=MA-M5C=M5C=dT=d5C=dT=dG=dT=d5C=dT=d5C=dT=d5C=MT=M5C=MT=MG=MG=MT |
| 520 | CO-18370 | AGGACCTCTGTCTCTCTCTGGT | 982 | MA=MG=MG=MA=M5C-M5C=dT=d5C=dT=dG=dT=d5C=dT=d5C=dT=d5C=MT-M5C=MT=MG=MG=MT |
| 521 | CO-18371 | AGGACCTCTGTCTCTCTCTGGT | 983 | MA=MG=MG=MA=M5C=M5C=dT=d5C=dT=dG=dT=d5C=dT=d5C=dT=d5C=MT-M5C=MT=MG=MG=MT |
| 522 | CO-18372 | AGGACCTCTGTCTCTCTCTGGT | 984 | MA=MG=MG=MA=M5C-M5C=dT=d5C=dT=dG=dT=d5C=dT=d5C=dT=d5C=MT=M5C=MT=MG=MG=MT |
| 523 | CO-18373 | AGGACCTCTGTCTCTCTCTGGT | 985 | MA=MG=MG=MA=M5C=M5C-dT=d5C=dT=dG=dT=d5C=dT=d5C=dT=d5C-MT=M5C=MT=MG=MG=MT |
| 524 | CO-18374 | AGGACCTCTGTCTCTCTCTGGT | 986 | MA=MG=MG=MA=M5C=M5C=dT=d5C=dT=dG=dT=d5C=dT=d5C=dT=d5C-MT=M5C=MT=MG=MG=MT |
| 525 | CO-18375 | AGGACCTCTGTCTCTCTCTGGT | 987 | MA=MG=MG=MA=M5C=M5C-dT=d5C=dT=dG=dT=d5C=dT=d5C=dT=d5C=MT=M5C=MT=MG=MG=MT |
| 526 | CO-18376 | CAAGTGCCAGGCCCACATGG | 988 | M5C=MA=MA=MG=dT=dG=d5C=d5C=dA=dG=dG=d5C=d5C=d5C=MA=M5C=MA=MT=MG=MG |
| 527 | CO-18377 | GGCAAGTGCCAGGCCCACAT | 989 | MG=MG=M5C=MA=MA=MG=dT=dG=d5C=d5C=dA=dG=dG=d5C=d5C=d5C=MA=M5C=MA=MT |
| 528 | CO-18378 | GGGCAAGTGCCAGGCCCACA | 990 | MG=MG=MG=M5C=MA=MA=MG=dT=dG=d5C=d5C=dA=dG=dG=d5C=d5C=d5C=MA=M5C=MA |
| 529 | CO-18379 | TCTCTCTGGTGTGTTTTTGAGT | 991 | MT=M5C=MT=M5C=MT=M5C=dT=dG=dG=dT=dG=dT=dG=dT=dT=dT=MT=MT=MG=MA=MG=MT |
| 530 | CO-18380 | TCTCTCTGGTGTGTTTTTGAGT | 992 | MT=M5C=MT=M5C=MT=M5C=MT=MG=MG=MT=MG=MT=MG=MT=MT=MT=MT=MT=MG=MA=MG=MT |
| 531 | CO-18381 | GGCAAGTGCCAGGCCCACAT | 993 | MG=MG=M5C=MA=MA=dG=dT=dG=d5C=d5C=dA=dG=dG=d5C=d5C=M5C=MA=M5C=MA=MT |
| 532 | CO-18382 | TGAAGTATCTTTCTCTGTGG | 994 | MT=MG=MA=LA=MG=dT=dA=dT=d5C=dT=dT=dT=d5C=dT=d5C=MT=LG=MT=MG=MG |
| 533 | CO-18383 | TGAAGTATCTTTCTCTGTGG | 995 | MT=MG=MA=LA=MG=dT=dA=dT=d5C=dT=dT=dT=d5C=dT=d5C=MT=MG=MT=MG=MG |
| 534 | CO-18384 | TGAAGTATCTTTCTCTGTGG | 996 | MT=MG=MA=MA=MG=dT=dA=dT=d5C=dT=dT=dT=d5C=dT=d5C=MT=LG=MT=MG=MG |
| 535 | CO-18385 | TGAAGTATCTTTCTCTGTGG | 997 | MT=MG=MA=MA=LG=dT=dA=dT=d5C=dT=dT=dT=d5C=dT=d5C=LT=MG=MT=MG=MG |
| 536 | CO-18386 | TGAAGTATCTTTCTCTGTGG | 998 | MT=MG=MA=MA=LG=dT=dA=dT=d5C=dT=dT=dT=d5C=dT=d5C=MT=MG=MT=MG=MG |
| 537 | CO-18387 | TGAAGTATCTTTCTCTGTGG | 999 | MT=MG=MA=MA=MG=dT=dA=dT=d5C=dT=dT=dT=d5C=dT=d5C=LT=MG=MT=MG=MG |
| 538 | CO-18388 | TGAAGTATCTTTCTCTGTGG | 1000 | MT=MG=MA=LA=LG=dT=dA=dT=d5C=dT=dT=dT=d5C=dT=d5C=MT=MG=MT=MG=MG |
| 539 | CO-18389 | TGAAGTATCTTTCTCTGTGG | 1001 | MT=MG=MA=MA=MG=dT=dA=dT=d5C=dT=dT=dT=d5C=dT=d5C=LT=LG=MT=MG=MG |
| 540 | CO-18390 | GGACCTCTGTCTCTCTCTGGTGTGTTTTTGAG | 1002 | MG=MG=MA=M5C=M5C=dT=d5C=dT=dG=dT=d5C=dT=d5C=dT=d5C=MT=M5C=MT=MG=MG=MT=MG=MT= |
| | | | | MG=MT=MT=MT=MT=MT=MG=MA=MG |
| 541 | CO-18391 | TCTCTGGTGTGTTTTTGAG | 1003 | MT=M5C=MT=M5C=MT=MG=MG=MT=MG=MT=MG=MT=MT=MT=MT=MT=MG=MA=MG |

TABLE 3
Exemplary SYNGAP1 ASO sequences that target RR86_v1 and/or RR86_v2

| SEQ | | SEQ | | SEQ | |
|---|---|---|---|---|---|
| ID NO | Sequence | ID NO | Sequence | ID NO | Sequence |
| 1004 | TACCGGGGGCGGGTGCTACA | 1657 | TGGTAAGTACCCAACTAATCT | 2310 | ATTAGCTGAGTGACGCTTCCAGCC |
| 1005 | AGGACCTACCGGGGGGGGT | 1658 | GGTAAGTACCCAACTAATCTC | 2311 | TTAGCTGAGTGACGCTTCCAGCCC |
| 1006 | CCCCTCTCAGGACCTACCGG | 1659 | GTAAGTACCCAACTAATCTCG | 2312 | TAGCTGAGTGACGCTTCCAGCCCG |
| 1007 | GGGCCTGTGCCCTCCTACTA | 1660 | TAAGTACCCAACTAATCTCGC | 2313 | AGCTGAGTGACGCTTCCAGCCCGT |
| 1008 | AGGACACCCTGGGCCTGTGC | 1661 | AAGTACCCAACTAATCTCGCC | 2314 | GCTGAGTGACGCTTCCAGCCCGTT |
| 1009 | TTGCGAGGACACCCTGGGCC | 1662 | AGTACCCAACTAATCTCGCCC | 2315 | CTGAGTGACGCTTCCAGCCCGTTT |
| 1010 | GCCCGTTGCGAGGACACCCT | 1663 | GTACCCAACTAATCTCGCCCC | 2316 | TGAGTGACGCTTCCAGCCCGTTTC |
| 1011 | GGGACGCCCGTTGCGAGGAC | 1664 | TACCCAACTAATCTCGCCCCT | 2317 | GAGTGACGCTTCCAGCCCGTTTCC |
| 1012 | TCCCCGGGACGCCCGTTGCG | 1665 | ACCCAACTAATCTCGCCCCTC | 2318 | AGTGACGCTTCCAGCCCGTTTCCC |
| 1013 | TTCAGCAGCTCCCCGGGACG | 1666 | CCCAACTAATCTCGCCCCTCT | 2319 | GTGACGCTTCCAGCCCGTTTCCCC |
| 1014 | AGGACTTCAGCAGCTCCCCG | 1667 | CCAACTAATCTCGCCCCTCTC | 2320 | TGACGCTTCCAGCCCGTTTCCCCC |
| 1015 | CGGGGAGGACTTCAGCAGCT | 1668 | CAACTAATCTCGCCCCTCTCA | 2321 | GACGCTTCCAGCCCGTTTCCCCCG |
| 1016 | TCTGCAGCGGGGAGGACTTC | 1669 | AACTAATCTCGCCCCTCTCAG | 2322 | ACGCTTCCAGCCCGTTTCCCCCGC |
| 1017 | CGGTCCTCTGCAGCGGGGAG | 1670 | ACTAATCTCGCCCCTCTCAGG | 2323 | CGCTTCCAGCCCGTTTCCCCCGCC |
| 1018 | CCTCTCGGTCCTCTGCAGCG | 1671 | CTAATCTCGCCCCTCTCAGGA | 2324 | GCTTCCAGCCCGTTTCCCCCGCCT |
| 1019 | GCCCTGCCTCTCGGTCCTCT | 1672 | TAATCTCGCCCCTCTCAGGAC | 2325 | CTTCCAGCCCGTTTCCCCCGCCTG |
| 1020 | CCCGGGCCCTGCCTCTCGGT | 1673 | AATCTCGCCCCTCTCAGGACC | 2326 | TTCCAGCCCGTTTCCCCCGCCTGG |
| 1021 | TGTTCTCTCCCGGGCCCTGC | 1674 | ATCTCGCCCCTCTCAGGACCT | 2327 | TCCAGCCCGTTTCCCCCGCCTGGA |
| 1022 | CGGGCTGTTCTCTCCCGGGC | 1675 | TCTCGCCCCTCTCAGGACCTA | 2328 | CCAGCCCGTTTCCCCCGCCTGGAA |
| 1023 | TCCGACCGGGCTGTTCTCTC | 1676 | CTCGCCCCTCTCAGGACCTAC | 2329 | CAGCCCGTTTCCCCCGCCTGGAAA |
| 1024 | CACCCCCTCCGACCGGGCTG | 1677 | TCTTTTAAAAATTACCTAGAAA | 2330 | AGCCCGTTTCCCCCGCCTGGAAAC |
| 1025 | GACGGCCCACCCCCTCCGAC | 1678 | TTAAAAATTACCTAGAAATAAG | 2331 | GCCCGTTTCCCCCGCCTGGAAACT |
| 1026 | CGGCTGACGGCCCACCCCCT | 1679 | TAAAAATTACCTAGAAATAAGG | 2332 | CCCGTTTCCCCCGCCTGGAAACTG |
| 1027 | TTTCCGGGGCGGCTGACGGC | 1680 | AAAAATTACCTAGAAATAAGGT | 2333 | CCGTTTCCCCCGCCTGGAAACTGA |
| 1028 | GCAGCTTTCCGGGGCGGCTG | 1681 | AAAATTACCTAGAAATAAGGTT | 2334 | CGTTTCCCCCGCCTGGAAACTGAG |
| 1029 | GAAACGCAGCTTTCCGGGGC | 1682 | AAATTACCTAGAAATAAGGTTT | 2335 | GTTTCCCCCGCCTGGAAACTGAGG |
| 1030 | ATCACCGGGAAACGCAGCTT | 1683 | AATTACCTAGAAATAAGGTTTC | 2336 | TTTCCCCCGCCTGGAAACTGAGGA |
| 1031 | ACTTAATCACCGGGAAACGC | 1684 | ATTACCTAGAAATAAGGTTTCT | 2337 | TTCCCCCGCCTGGAAACTGAGGAC |
| 1032 | GTGCTACACTTAATCACCGG | 1685 | TTACCTAGAAATAAGGTTTCTT | 2338 | TCCCCCGCCTGGAAACTGAGGACG |
| 1033 | GGCGGGTGCTACACTTAATC | 1686 | TACCTAGAAATAAGGTTTCTTT | 2339 | CCCCCGCCTGGAAACTGAGGACGG |
| 1034 | CTAATCTCGCCCCTCTCAGG | 1687 | ACCTAGAAATAAGGTTTCTTTA | 2340 | CCCCGCCTGGAAACTGAGGACGGC |
| 1035 | AGTACCCAACTAATCTCGCC | 1688 | CCTAGAAATAAGGTTTCTTTAA | 2341 | CCCGCCTGGAAACTGAGGACGGCA |
| 1036 | TGGTAAGTACCCAACTAATC | 1689 | CTAGAAATAAGGTTTCTTTAAT | 2342 | CCGCCTGGAAACTGAGGACGGCAA |
| 1037 | GCCCACATGGTAAGTACCCA | 1690 | TAGAAATAAGGTTTCTTTAATT | 2343 | CGCCTGGAAACTGAGGACGGCAAC |
| 1038 | GCCAGGCCCACATGGTAAGT | 1691 | AGAAATAAGGTTTCTTTAATTG | 2344 | GCCTGGAAACTGAGGACGGCAACC |
| 1039 | GATGTGGGCAAGTGCCAGGC | 1692 | GAAATAAGGTTTCTTTAATTGC | 2345 | CCTGGAAACTGAGGACGGCAACCC |
| 1040 | AAAGTGATGTGGGCAAGTGC | 1693 | AAATAAGGTTTCTTTAATTGCT | 2346 | CTGGAAACTGAGGACGGCAACCCC |
| 1041 | GACACAAAGTGATGTGGGCA | 1694 | AATAAGGTTTCTTTAATTGCTG | 2347 | TGGAAACTGAGGACGGCAACCCCC |
| 1042 | CCGGTGGGAAGACACAAAGT | 1695 | ATAAGGTTTCTTTAATTGCTGG | 2348 | GGAAACTGAGGACGGCAACCCCCA |
| 1043 | CGCAGGGCCGGTGGGAAGAC | 1696 | TAAGGTTTCTTTAATTGCTGGT | 2349 | GAAACTGAGGACGGCAACCCCCAC |
| 1044 | ACCCTCGCAGGGCCGGTGGG | 1697 | AAGGTTTCTTTAATTGCTGGTT | 2350 | AAACTGAGGACGGCAACCCCCACC |
| 1045 | CCCCCACCCTCGCAGGGCCG | 1698 | AGGTTTCTTTAATTGCTGGTTA | 2351 | AACTGAGGACGGCAACCCCCACCC |
| 1046 | GGCAACCCCCACCCTCGCAG | 1699 | GGTTTCTTTAATTGCTGGTTAA | 2352 | ACTGAGGACGGCAACCCCCACCCT |
| 1047 | TGAGGACGGCAACCCCCACC | 1700 | GTTTCTTTAATTGCTGGTTAAA | 2353 | CTGAGGACGGCAACCCCCACCCTC |
| 1048 | GGAAACTGAGGACGGCAACC | 1701 | TTTCTTTAATTGCTGGTTAAAA | 2354 | TGAGGACGGCAACCCCCACCCTCG |
| 1049 | CGCCTGGAAACTGAGGACGG | 1702 | TTCTTTAATTGCTGGTTAAAAT | 2355 | GAGGACGGCAACCCCCACCCTCGC |
| 1050 | TTCCCCCGCCTGGAAACTGA | 1703 | TCTTTAATTGCTGGTTAAAATG | 2356 | AGGACGGCAACCCCCACCCTCGCA |
| 1051 | GCCCGTTTCCCCCGCCTGGA | 1704 | CTTTAATTGCTGGTTAAAATGC | 2357 | GGACGGCAACCCCCACCCTCGCAG |
| 1052 | TTCCAGCCCGTTTCCCCCGC | 1705 | TTTAATTGCTGGTTAAAATGCT | 2358 | GACGGCAACCCCCACCCTCGCAGG |
| 1053 | AGTGACGCTTCCAGCCCGTT | 1706 | TTAATTGCTGGTTAAAATGCTC | 2359 | ACGGCAACCCCCACCCTCGCAGGG |
| 1054 | TTAGCTGAGTGACGCTTCCA | 1707 | TAATTGCTGGTTAAAATGCTCC | 2360 | CGGCAACCCCCACCCTCGCAGGGC |
| 1055 | CTACTATTAGCTGAGTGACG | 1708 | AATTGCTGGTTAAAATGCTCCC | 2361 | GGCAACCCCCACCCTCGCAGGGCC |
| 1056 | GTCCACTACTATTAGCTGAG | 1709 | ATTGCTGGTTAAAATGCTCCCG | 2362 | GCAACCCCCACCCTCGCAGGGCCG |
| 1057 | AGTCCCAGGTCCACTACTAT | 1710 | TTGCTGGTTAAAATGCTCCCGT | 2363 | CAACCCCCACCCTCGCAGGGCCGG |
| 1058 | GCAAATCTGAGTTCCAGTCC | 1711 | TGCTGGTTAAAATGCTCCCGTG | 2364 | AACCCCCACCCTCGCAGGGCCGGT |
| 1059 | TCCTTAGCAAATCTGAGTTC | 1712 | GCTGGTTAAAATGCTCCCGTGC | 2365 | ACCCCCACCCTCGCAGGGCCGGTG |
| 1060 | CCTGGTTCCTTAGCAAATCT | 1713 | CTGGTTAAAATGCTCCCGTGCA | 2366 | CCCCCACCCTCGCAGGGCCGGTGG |
| 1061 | AACCTGCCTGGTTCCTTAGC | 1714 | TGGTTAAAATGCTCCCGTGCAG | 2367 | CCCCACCCTCGCAGGGCCGGTGGG |
| 1062 | GGAAAGAACCTGCCTGGTTC | 1715 | GGTTAAAATGCTCCCGTGCAGA | 2368 | CCCACCCTCGCAGGGCCGGTGGGA |
| 1063 | TCCCGTGCAGAAAACAGGAA | 1716 | GTTAAAATGCTCCCGTGCAGAA | 2369 | CCACCCTCGCAGGGCCGGTGGGAA |
| 1064 | AATGCTCCCGTGCAGAAAAC | 1717 | TTAAAATGCTCCCGTGCAGAAA | 2370 | CACCCTCGCAGGGCCGGTGGGAAG |
| 1065 | GGTTAAAATGCTCCCGTGCA | 1718 | TAAAATGCTCCCGTGCAGAAAA | 2371 | ACCCTCGCAGGGCCGGTGGGAAGA |
| 1066 | ATTGCTGGTTAAAATGCTCC | 1719 | AAAATGCTCCCGTGCAGAAAAC | 2372 | CCCTCGCAGGGCCGGTGGGAAGAC |
| 1067 | CTTTAATTGCTGGTTAAAAT | 1720 | AAATGCTCCCGTGCAGAAAACA | 2373 | CCTCGCAGGGCCGGTGGGAAGACA |
| 1068 | AGGTTTCTTTAATTGCTGGT | 1721 | AATGCTCCCGTGCAGAAAACAG | 2374 | CTCGCAGGGCCGGTGGGAAGACAC |
| 1069 | GAAATAAGGTTTCTTTAATT | 1722 | ATGCTCCCGTGCAGAAAACAGG | 2375 | TCGCAGGGCCGGTGGGAAGACACA |
| 1070 | TTACCTAGAAATAAGGTTTC | 1723 | TGCTCCCGTGCAGAAAACAGGA | 2376 | CGCAGGGCCGGTGGGAAGACACAA |
| 1071 | TGGTTAAAATGCTCCCGT | 1724 | GCTCCCGTGCAGAAAACAGGAA | 2377 | GCAGGGCCGGTGGGAAGACACAAA |
| 1072 | GGTTAAAATGCTCCCGTG | 1725 | CTCCCGTGCAGAAAACAGGAAA | 2378 | CAGGGCCGGTGGGAAGACACAAAG |
| 1073 | GTTAAAATGCTCCCGTGC | 1726 | TCCCGTGCAGAAAACAGGAAAG | 2379 | AGGGCCGGTGGGAAGACACAAAGT |
| 1074 | AATGCTCCCGTGCAGAAA | 1727 | CCCGTGCAGAAAACAGGAAAGA | 2380 | GGGCCGGTGGGAAGACACAAAGTG |
| 1075 | ATGCTCCCGTGCAGAAAA | 1728 | CCGTGCAGAAAACAGGAAAGAA | 2381 | GGCCGGTGGGAAGACACAAAGTGA |
| 1076 | CTCCCGTGCAGAAAACAG | 1729 | CGTGCAGAAAACAGGAAAGAAC | 2382 | GCCGGTGGGAAGACACAAAGTGAT |
| 1077 | CCCGTGCAGAAAACAGGA | 1730 | GTGCAGAAAACAGGAAAGAACC | 2383 | CCGGTGGGAAGACACAAAGTGATG |
| 1078 | AAAGAACCTGCCTGGTTC | 1731 | GCAGAAAACAGGAAAGAACCTG | 2384 | CGGTGGGAAGACACAAAGTGATGT |
| 1079 | AACCTGCCTGGTTCCTTA | 1732 | CAGAAAACAGGAAAGAACCTGC | 2385 | GGTGGGAAGACACAAAGTGATGTG |
| 1080 | ACCTGCCTGGTTCCTTAG | 1733 | AGAAAACAGGAAAGAACCTGCC | 2386 | GTGGGAAGACACAAAGTGATGTGG |
| 1081 | TTAGCAAATCTGAGTTCC | 1734 | GAAAACAGGAAAGAACCTGCCT | 2387 | TGGGAAGACACAAAGTGATGTGGG |
| 1082 | CCAGTCCCAGGTCCACTA | 1735 | AAAACAGGAAAGAACCTGCCTG | 2388 | GGGAAGACACAAAGTGATGTGGGC |
| 1083 | AGGTCCACTACTATTAGC | 1736 | AAACAGGAAAGAACCTGCCTGG | 2389 | GGAAGACACAAAGTGATGTGGGCA |
| 1084 | GGTCCACTACTATTAGCT | 1737 | AACAGGAAAGAACCTGCCTGGT | 2390 | GAAGACACAAAGTGATGTGGGCAA |
| 1085 | TCCACTACTATTAGCTGA | 1738 | ACAGGAAAGAACCTGCCTGGTT | 2391 | AAGACACAAAGTGATGTGGGCAAG |
| 1086 | CTATTAGCTGAGTGACGC | 1739 | CAGGAAAGAACCTGCCTGGTTC | 2392 | AGACACAAAGTGATGTGGGCAAGT |
| 1087 | ATTAGCTGAGTGACGCTT | 1740 | AGGAAAGAACCTGCCTGGTTCC | 2393 | GACACAAAGTGATGTGGGCAAGTG |
| 1088 | TTAGCTGAGTGACGCTTC | 1741 | GGAAAGAACCTGCCTGGTTCCT | 2394 | ACACAAAGTGATGTGGGCAAGTGC |
| 1089 | TAGCTGAGTGACGCTTCC | 1742 | GAAAGAACCTGCCTGGTTCCTT | 2395 | CACAAAGTGATGTGGGCAAGTGCC |
| 1090 | TGAGTGACGCTTCCAGCC | 1743 | AAAGAACCTGCCTGGTTCCTTA | 2396 | ACAAAGTGATGTGGGCAAGTGCCA |
| 1091 | GAGTGACGCTTCCAGCCC | 1744 | AAGAACCTGCCTGGTTCCTTAG | 2397 | CAAAGTGATGTGGGCAAGTGCCAG |
| 1092 | AGTGACGCTTCCAGCCCG | 1745 | AGAACCTGCCTGGTTCCTTAGC | 2398 | AAAGTGATGTGGGCAAGTGCCAGG |
| 1093 | GTGACGCTTCCAGCCCGT | 1746 | GAACCTGCCTGGTTCCTTAGCA | 2399 | AAGTGATGTGGGCAAGTGCCAGGC |
| 1094 | GACGCTTCCAGCCCGTTT | 1747 | AACCTGCCTGGTTCCTTAGCAA | 2400 | AGTGATGTGGGCAAGTGCCAGGCC |
| 1095 | CGCTTCCAGCCCGTTTCC | 1748 | ACCTGCCTGGTTCCTTAGCAAA | 2401 | GTGATGTGGGCAAGTGCCAGGCCC |
| 1096 | CAGCCCGTTTCCCCCGCC | 1749 | CCTGCCTGGTTCCTTAGCAAAT | 2402 | TGATGTGGGCAAGTGCCAGGCCCA |
| 1097 | CGTTTCCCCCGCCTGGAA | 1750 | CTGCCTGGTTCCTTAGCAAATC | 2403 | GATGTGGGCAAGTGCCAGGCCCAC |
| 1098 | TTTCCCCCGCCTGGAAAC | 1751 | TGCCTGGTTCCTTAGCAAATCT | 2404 | ATGTGGGCAAGTGCCAGGCCCACA |
| 1099 | CCCCCGCCTGGAAACTGA | 1752 | GCCTGGTTCCTTAGCAAATCTG | 2405 | TGTGGGCAAGTGCCAGGCCCACAT |
| 1100 | CGCCTGGAAACTGAGGAC | 1753 | CCTGGTTCCTTAGCAAATCTGA | 2406 | GTGGGCAAGTGCCAGGCCCACATG |
| 1101 | GCCTGGAAACTGAGGACG | 1754 | CTGGTTCCTTAGCAAATCTGAG | 2407 | TGGGCAAGTGCCAGGCCCACATGG |
| 1102 | CCTGGAAACTGAGGACGG | 1755 | TGGTTCCTTAGCAAATCTGAGT | 2408 | GGGCAAGTGCCAGGCCCACATGGT |
| 1103 | CTGAGGACGGCAACCCCC | 1756 | GGTTCCTTAGCAAATCTGAGTT | 2409 | GGCAAGTGCCAGGCCCACATGGTA |
| 1104 | TGAGGACGGCAACCCCCA | 1757 | GTTCCTTAGCAAATCTGAGTTC | 2410 | GCAAGTGCCAGGCCCACATGGTAA |
| 1105 | AGGACGGCAACCCCCACC | 1758 | TTCCTTAGCAAATCTGAGTTCC | 2411 | CAAGTGCCAGGCCCACATGGTAAG |
| 1106 | CACCCTCGCAGGGCCGGT | 1759 | TCCTTAGCAAATCTGAGTTCCA | 2412 | AAGTGCCAGGCCCACATGGTAAGT |
| 1107 | ACCCTCGCAGGGCCGGTG | 1760 | CCTTAGCAAATCTGAGTTCCAG | 2413 | AGTGCCAGGCCCACATGGTAAGTA |
| 1108 | CTCGCAGGGCCGGTGGGA | 1761 | CTTAGCAAATCTGAGTTCCAGT | 2414 | GTGCCAGGCCCACATGGTAAGTAC |
| 1109 | TCGCAGGGCCGGTGGGAA | 1762 | TTAGCAAATCTGAGTTCCAGTC | 2415 | TGCCAGGCCCACATGGTAAGTACC |
| 1110 | GGGCCGGTGGGAAGACAC | 1763 | TAGCAAATCTGAGTTCCAGTCC | 2416 | GCCAGGCCCACATGGTAAGTACCC |
| 1111 | GGCCGGTGGGAAGACACA | 1764 | AGCAAATCTGAGTTCCAGTCCC | 2417 | CCAGGCCCACATGGTAAGTACCCA |
| 1112 | ACACAAAGTGATGTGGGC | 1765 | GCAAATCTGAGTTCCAGTCCCA | 2418 | CAGGCCCACATGGTAAGTACCCAA |
| 1113 | TGATGTGGGCAAGTGCCA | 1766 | CAAATCTGAGTTCCAGTCCCAG | 2419 | AGGCCCACATGGTAAGTACCCAAC |
| 1114 | GATGTGGGCAAGTGCCAG | 1767 | AAATCTGAGTTCCAGTCCCAGG | 2420 | GGCCCACATGGTAAGTACCCAACT |
| 1115 | AGTACCCAACTAATCTCG | 1768 | AATCTGAGTTCCAGTCCCAGGT | 2421 | GCCCACATGGTAAGTACCCAACTA |
| 1116 | GTACCCAACTAATCTCGC | 1769 | TCTGAGTTCCAGTCCCAGGTCC | 2422 | CCCACATGGTAAGTACCCAACTAA |
| 1117 | TACCCAACTAATCTCGCC | 1770 | GAGTTCCAGTCCCAGGTCCACT | 2423 | CCACATGGTAAGTACCCAACTAAT |
| 1118 | CCCAACTAATCTCGCCCC | 1771 | AGTTCCAGTCCCAGGTCCACTA | 2424 | CACATGGTAAGTACCCAACTAATC |
| 1119 | CCAACTAATCTCGCCCCT | 1772 | GTTCCAGTCCCAGGTCCACTAC | 2425 | ACATGGTAAGTACCCAACTAATCT |
| 1120 | CAACTAATCTCGCCCCTC | 1773 | TTCCAGTCCCAGGTCCACTACT | 2426 | CATGGTAAGTACCCAACTAATCTC |
| 1121 | AACTAATCTCGCCCCTCT | 1774 | TCCAGTCCCAGGTCCACTACTA | 2427 | ATGGTAAGTACCCAACTAATCTCG |
| 1122 | ACTAATCTCGCCCCTCTC | 1775 | CCAGTCCCAGGTCCACTACTAT | 2428 | TGGTAAGTACCCAACTAATCTCGC |
| 1123 | TAATCTCGCCCCTCTCAG | 1776 | CAGTCCCAGGTCCACTACTATT | 2429 | GGTAAGTACCCAACTAATCTCGCC |
| 1124 | AATCTCGCCCCTCTCAGG | 1777 | AGTCCCAGGTCCACTACTATTA | 2430 | GTAAGTACCCAACTAATCTCGCCC |
| 1125 | CGCCCCTCTCAGGACCTA | 1778 | GTCCCAGGTCCACTACTATTAG | 2431 | TAAGTACCCAACTAATCTCGCCCC |
| 1126 | ATTACCTAGAAATAAGGTT | 1779 | TCCCAGGTCCACTACTATTAGC | 2432 | AAGTACCCAACTAATCTCGCCCCT |
| 1127 | TACCTAGAAATAAGGTTTC | 1780 | CCCAGGTCCACTACTATTAGCT | 2433 | AGTACCCAACTAATCTCGCCCCTC |
| 1128 | ACCTAGAAATAAGGTTTCT | 1781 | CCAGGTCCACTACTATTAGCTG | 2434 | GTACCCAACTAATCTCGCCCCTCT |
| 1129 | CCTAGAAATAAGGTTTCTT | 1782 | CAGGTCCACTACTATTAGCTGA | 2435 | TACCCAACTAATCTCGCCCCTCTC |
| 1130 | TAGAAATAAGGTTTCTTTA | 1783 | AGGTCCACTACTATTAGCTGAG | 2436 | ACCCAACTAATCTCGCCCCTCTCA |
| 1131 | ATAAGGTTTCTTTAATTGC | 1784 | GGTCCACTACTATTAGCTGAGT | 2437 | CCCAACTAATCTCGCCCCTCTCAG |
| 1132 | AAGGTTTCTTTAATTGCTG | 1785 | GTCCACTACTATTAGCTGAGTG | 2438 | CCAACTAATCTCGCCCCTCTCAGG |
| 1133 | GTTTCTTTAATTGCTGGTT | 1786 | TCCACTACTATTAGCTGAGTGA | 2439 | CAACTAATCTCGCCCCTCTCAGGA |
| 1134 | TTCTTTAATTGCTGGTTAA | 1787 | CACTACTATTAGCTGAGTGACG | 2440 | AACTAATCTCGCCCCTCTCAGGAC |
| 1135 | TCTTTAATTGCTGGTTAAA | 1788 | ACTACTATTAGCTGAGTGACGC | 2441 | ACTAATCTCGCCCCTCTCAGGACC |
| 1136 | CTTTAATTGCTGGTTAAAA | 1789 | CTACTATTAGCTGAGTGACGCT | 2442 | CTAATCTCGCCCCTCTCAGGACCT |
| 1137 | TAATTGCTGGTTAAAATGC | 1790 | TACTATTAGCTGAGTGACGCTT | 2443 | TAATCTCGCCCCTCTCAGGACCTA |
| 1138 | AATTGCTGGTTAAAATGCT | 1791 | ACTATTAGCTGAGTGACGCTTC | 2444 | AATCTCGCCCCTCTCAGGACCTAC |
| 1139 | ATTGCTGGTTAAAATGCTC | 1792 | CTATTAGCTGAGTGACGCTTCC | 2445 | TCTTTTAAAAATTACCTAGAAATAA |
| 1140 | GCTGGTTAAAATGCTCCCG | 1793 | TATTAGCTGAGTGACGCTTCCA | 2446 | CTTTTAAAAATTACCTAGAAATAAG |
| 1141 | CTGGTTAAAATGCTCCCGT | 1794 | ATTAGCTGAGTGACGCTTCCAG | 2447 | TTTTAAAAATTACCTAGAAATAAGG |
| 1142 | TGGTTAAAATGCTCCCGTG | 1795 | TTAGCTGAGTGACGCTTCCAGC | 2448 | TTTAAAAATTACCTAGAAATAAGGT |
| 1143 | GGTTAAAATGCTCCCGTGC | 1796 | TAGCTGAGTGACGCTTCCAGCC | 2449 | TTAAAAATTACCTAGAAATAAGGTT |
| 1144 | GTTAAAATGCTCCCGTGCA | 1797 | AGCTGAGTGACGCTTCCAGCCC | 2450 | TAAAAATTACCTAGAAATAAGGTTT |
| 1145 | AAATGCTCCCGTGCAGAAA | 1798 | GCTGAGTGACGCTTCCAGCCCG | 2451 | AAAAATTACCTAGAAATAAGGTTTC |
| 1146 | AATGCTCCCGTGCAGAAAA | 1799 | CTGAGTGACGCTTCCAGCCCGT | 2452 | AAAATTACCTAGAAATAAGGTTTCT |
| 1147 | ATGCTCCCGTGCAGAAAAC | 1800 | TGAGTGACGCTTCCAGCCCGTT | 2453 | AAATTACCTAGAAATAAGGTTTCTT |
| 1148 | GCTCCCGTGCAGAAAACAG | 1801 | GAGTGACGCTTCCAGCCCGTTT | 2454 | AATTACCTAGAAATAAGGTTTCTTT |
| 1149 | CTCCCGTGCAGAAAACAGG | 1802 | AGTGACGCTTCCAGCCCGTTTC | 2455 | ATTACCTAGAAATAAGGTTTCTTTA |
| 1150 | TCCCGTGCAGAAAACAGGA | 1803 | GTGACGCTTCCAGCCCGTTTCC | 2456 | TTACCTAGAAATAAGGTTTCTTTAA |
| 1151 | CCCGTGCAGAAAACAGGAA | 1804 | TGACGCTTCCAGCCCGTTTCCC | 2457 | TACCTAGAAATAAGGTTTCTTTAAT |
| 1152 | CGTGCAGAAAACAGGAAAG | 1805 | GACGCTTCCAGCCCGTTTCCCC | 2458 | ACCTAGAAATAAGGTTTCTTTAATT |
| 1153 | ACAGGAAAGAACCTGCCTG | 1806 | ACGCTTCCAGCCCGTTTCCCCC | 2459 | CCTAGAAATAAGGTTTCTTTAATTG |
| 1154 | GAAAGAACCTGCCTGGTTC | 1807 | CGCTTCCAGCCCGTTTCCCCCG | 2460 | CTAGAAATAAGGTTTCTTTAATTGC |
| 1155 | AAAGAACCTGCCTGGTTCC | 1808 | GCTTCCAGCCCGTTTCCCCCGC | 2461 | TAGAAATAAGGTTTCTTTAATTGCT |
| 1156 | AGAACCTGCCTGGTTCCTT | 1809 | CTTCCAGCCCGTTTCCCCCGCC | 2462 | AGAAATAAGGTTTCTTTAATTGCTG |
| 1157 | GAACCTGCCTGGTTCCTTA | 1810 | TTCCAGCCCGTTTCCCCCGCCT | 2463 | GAAATAAGGTTTCTTTAATTGCTGG |
| 1158 | AACCTGCCTGGTTCCTTAG | 1811 | TCCAGCCCGTTTCCCCCGCCTG | 2464 | AAATAAGGTTTCTTTAATTGCTGGT |
| 1159 | ACCTGCCTGGTTCCTTAGC | 1812 | CCAGCCCGTTTCCCCCGCCTGG | 2465 | AATAAGGTTTCTTTAATTGCTGGTT |
| 1160 | CTGCCTGGTTCCTTAGCAA | 1813 | CAGCCCGTTTCCCCCGCCTGGA | 2466 | ATAAGGTTTCTTTAATTGCTGGTTA |
| 1161 | TGCCTGGTTCCTTAGCAAA | 1814 | AGCCCGTTTCCCCCGCCTGGAA | 2467 | TAAGGTTTCTTTAATTGCTGGTTAA |
| 1162 | GCCTGGTTCCTTAGCAAAT | 1815 | GCCCGTTTCCCCCGCCTGGAAA | 2468 | AAGGTTTCTTTAATTGCTGGTTAAA |
| 1163 | CCTGGTTCCTTAGCAAATC | 1816 | CCCGTTTCCCCCGCCTGGAAAC | 2469 | AGGTTTCTTTAATTGCTGGTTAAAA |
| 1164 | TGGTTCCTTAGCAAATCTG | 1817 | CCGTTTCCCCCGCCTGGAAACT | 2470 | GGTTTCTTTAATTGCTGGTTAAAAT |
| 1165 | CCTTAGCAAATCTGAGTTC | 1818 | CGTTTCCCCCGCCTGGAAACTG | 2471 | GTTTCTTTAATTGCTGGTTAAAATG |
| 1166 | CTTAGCAAATCTGAGTTCC | 1819 | GTTTCCCCCGCCTGGAAACTGA | 2472 | TTTCTTTAATTGCTGGTTAAAATGC |
| 1167 | TTAGCAAATCTGAGTTCCA | 1820 | TTTCCCCCGCCTGGAAACTGAG | 2473 | TTCTTTAATTGCTGGTTAAAATGCT |
| 1168 | TAGCAAATCTGAGTTCCAG | 1821 | TTCCCCCGCCTGGAAACTGAGG | 2474 | TCTTTAATTGCTGGTTAAAATGCTC |
| 1169 | TTCCAGTCCCAGGTCCACT | 1822 | TCCCCCGCCTGGAAACTGAGGA | 2475 | CTTTAATTGCTGGTTAAAATGCTCC |
| 1170 | TCCAGTCCCAGGTCCACTA | 1823 | CCCCCGCCTGGAAACTGAGGAC | 2476 | TTTAATTGCTGGTTAAAATGCTCCC |
| 1171 | CCAGTCCCAGGTCCACTAC | 1824 | CCCCGCCTGGAAACTGAGGACG | 2477 | TTAATTGCTGGTTAAAATGCTCCCG |
| 1172 | GTCCCAGGTCCACTACTAT | 1825 | CCCGCCTGGAAACTGAGGACGG | 2478 | TAATTGCTGGTTAAAATGCTCCCGT |
| 1173 | CCAGGTCCACTACTATTAG | 1826 | CCGCCTGGAAACTGAGGACGGC | 2479 | AATTGCTGGTTAAAATGCTCCCGTG |
| 1174 | CAGGTCCACTACTATTAGC | 1827 | CGCCTGGAAACTGAGGACGGCA | 2480 | ATTGCTGGTTAAAATGCTCCCGTGC |
| 1175 | AGGTCCACTACTATTAGCT | 1828 | GCCTGGAAACTGAGGACGGCAA | 2481 | TTGCTGGTTAAAATGCTCCCGTGCA |
| 1176 | GGTCCACTACTATTAGCTG | 1829 | CCTGGAAACTGAGGACGGCAAC | 2482 | TGCTGGTTAAAATGCTCCCGTGCAG |
| 1177 | GTCCACTACTATTAGCTGA | 1830 | CTGGAAACTGAGGACGGCAACC | 2483 | GCTGGTTAAAATGCTCCCGTGCAGA |
| 1178 | TCCACTACTATTAGCTGAG | 1831 | TGGAAACTGAGGACGGCAACCC | 2484 | CTGGTTAAAATGCTCCCGTGCAGAA |
| 1179 | TACTATTAGCTGAGTGACG | 1832 | GGAAACTGAGGACGGCAACCCC | 2485 | TGGTTAAAATGCTCCCGTGCAGAAA |
| 1180 | ACTATTAGCTGAGTGACGC | 1833 | GAAACTGAGGACGGCAACCCCC | 2486 | GGTTAAAATGCTCCCGTGCAGAAAA |
| 1181 | CTATTAGCTGAGTGACGCT | 1834 | AAACTGAGGACGGCAACCCCCA | 2487 | GTTAAAATGCTCCCGTGCAGAAAAC |
| 1182 | TATTAGCTGAGTGACGCTT | 1835 | AACTGAGGACGGCAACCCCCAC | 2488 | TTAAAATGCTCCCGTGCAGAAAACA |
| 1183 | ATTAGCTGAGTGACGCTTC | 1836 | ACTGAGGACGGCAACCCCCACC | 2489 | TAAAATGCTCCCGTGCAGAAAACAG |
| 1184 | TTAGCTGAGTGACGCTTCC | 1837 | CTGAGGACGGCAACCCCCACCC | 2490 | AAAATGCTCCCGTGCAGAAAACAGG |
| 1185 | TAGCTGAGTGACGCTTCCA | 1838 | TGAGGACGGCAACCCCCACCCT | 2491 | AAATGCTCCCGTGCAGAAAACAGGA |
| 1186 | AGCTGAGTGACGCTTCCAG | 1839 | GAGGACGGCAACCCCCACCCTC | 2492 | AATGCTCCCGTGCAGAAAACAGGAA |
| 1187 | GCTGAGTGACGCTTCCAGC | 1840 | AGGACGGCAACCCCCACCCTCG | 2493 | ATGCTCCCGTGCAGAAAACAGGAAA |
| 1188 | CTGAGTGACGCTTCCAGCC | 1841 | GGACGGCAACCCCCACCCTCGC | 2494 | TGCTCCCGTGCAGAAAACAGGAAAG |
| 1189 | TGAGTGACGCTTCCAGCCC | 1842 | GACGGCAACCCCCACCCTCGCA | 2495 | GCTCCCGTGCAGAAAACAGGAAAGA |
| 1190 | GAGTGACGCTTCCAGCCCG | 1843 | ACGGCAACCCCCACCCTCGCAG | 2496 | CTCCCGTGCAGAAAACAGGAAAGAA |
| 1191 | AGTGACGCTTCCAGCCCGT | 1844 | CGGCAACCCCCACCCTCGCAGG | 2497 | TCCCGTGCAGAAAACAGGAAAGAAC |
| 1192 | GTGACGCTTCCAGCCCGTT | 1845 | GGCAACCCCCACCCTCGCAGGG | 2498 | CCCGTGCAGAAAACAGGAAAGAACC |
| 1193 | TGACGCTTCCAGCCCGTTT | 1846 | GCAACCCCCACCCTCGCAGGGC | 2499 | CCGTGCAGAAAACAGGAAAGAACCT |
| 1194 | GACGCTTCCAGCCCGTTTC | 1847 | CAACCCCCACCCTCGCAGGGCC | 2500 | CGTGCAGAAAACAGGAAAGAACCTG |
| 1195 | ACGCTTCCAGCCCGTTTCC | 1848 | AACCCCCACCCTCGCAGGGCCG | 2501 | GTGCAGAAAACAGGAAAGAACCTGC |
| 1196 | CGCTTCCAGCCCGTTTCCC | 1849 | ACCCCCACCCTCGCAGGGCCGG | 2502 | TGCAGAAAACAGGAAAGAACCTGCC |
| 1197 | CTTCCAGCCCGTTTCCCCC | 1850 | CCCCCACCCTCGCAGGGCCGGT | 2503 | GCAGAAAACAGGAAAGAACCTGCCT |
| 1198 | TTCCAGCCCGTTTCCCCCG | 1851 | CCCCACCCTCGCAGGGCCGGTG | 2504 | CAGAAAACAGGAAAGAACCTGCCTG |
| 1199 | TCCAGCCCGTTTCCCCCGC | 1852 | CCCACCCTCGCAGGGCCGGTGG | 2505 | AGAAAACAGGAAAGAACCTGCCTGG |
| 1200 | CCAGCCCGTTTCCCCCGCC | 1853 | CCACCCTCGCAGGGCCGGTGGG | 2506 | GAAAACAGGAAAGAACCTGCCTGGT |
| 1201 | CAGCCCGTTTCCCCCGCCT | 1854 | CACCCTCGCAGGGCCGGTGGGA | 2507 | AAAACAGGAAAGAACCTGCCTGGTT |
| 1202 | CCGTTTCCCCCGCCTGGAA | 1855 | ACCCTCGCAGGGCCGGTGGGAA | 2508 | AAACAGGAAAGAACCTGCCTGGTTC |
| 1203 | CGTTTCCCCCGCCTGGAAA | 1856 | CCCTCGCAGGGCCGGTGGGAAG | 2509 | AACAGGAAAGAACCTGCCTGGTTCC |
| 1204 | GTTTCCCCCGCCTGGAAAC | 1857 | CCTCGCAGGGCCGGTGGGAAGA | 2510 | ACAGGAAAGAACCTGCCTGGTTCCT |
| 1205 | TTTCCCCCGCCTGGAAACT | 1858 | CTCGCAGGGCCGGTGGGAAGAC | 2511 | CAGGAAAGAACCTGCCTGGTTCCTT |
| 1206 | TCCCCCGCCTGGAAACTGA | 1859 | TCGCAGGGCCGGTGGGAAGACA | 2512 | AGGAAAGAACCTGCCTGGTTCCTTA |
| 1207 | CCCCCGCCTGGAAACTGAG | 1860 | CGCAGGGCCGGTGGGAAGACAC | 2513 | GGAAAGAACCTGCCTGGTTCCTTAG |
| 1208 | CCGCCTGGAAACTGAGGAC | 1861 | GCAGGGCCGGTGGGAAGACACA | 2514 | GAAAGAACCTGCCTGGTTCCTTAGC |
| 1209 | CGCCTGGAAACTGAGGACG | 1862 | CAGGGCCGGTGGGAAGACACAA | 2515 | AAAGAACCTGCCTGGTTCCTTAGCA |
| 1210 | GCCTGGAAACTGAGGACGG | 1863 | AGGGCCGGTGGGAAGACACAAA | 2516 | AAGAACCTGCCTGGTTCCTTAGCAA |
| 1211 | CCTGGAAACTGAGGACGGC | 1864 | GGGCCGGTGGGAAGACACAAAG | 2517 | AGAACCTGCCTGGTTCCTTAGCAAA |
| 1212 | CTGGAAACTGAGGACGGCA | 1865 | GGCCGGTGGGAAGACACAAAGT | 2518 | GAACCTGCCTGGTTCCTTAGCAAAT |
| 1213 | TGGAAACTGAGGACGGCAA | 1866 | GCCGGTGGGAAGACACAAAGTG | 2519 | AACCTGCCTGGTTCCTTAGCAAATC |
| 1214 | GGAAACTGAGGACGGCAAC | 1867 | CCGGTGGGAAGACACAAAGTGA | 2520 | ACCTGCCTGGTTCCTTAGCAAATCT |
| 1215 | ACTGAGGACGGCAACCCCC | 1868 | CGGTGGGAAGACACAAAGTGAT | 2521 | CCTGCCTGGTTCCTTAGCAAATCTG |
| 1216 | CTGAGGACGGCAACCCCCA | 1869 | GGTGGGAAGACACAAAGTGATG | 2522 | CTGCCTGGTTCCTTAGCAAATCTGA |
| 1217 | TGAGGACGGCAACCCCCAC | 1870 | GTGGGAAGACACAAAGTGATGT | 2523 | TGCCTGGTTCCTTAGCAAATCTGAG |
| 1218 | GAGGACGGCAACCCCCACC | 1871 | TGGGAAGACACAAAGTGATGTG | 2524 | GCCTGGTTCCTTAGCAAATCTGAGT |
| 1219 | AGGACGGCAACCCCCACCC | 1872 | GGGAAGACACAAAGTGATGTGG | 2525 | CCTGGTTCCTTAGCAAATCTGAGTT |
| 1220 | GGCAACCCCCACCCTCGCA | 1873 | GGAAGACACAAAGTGATGTGGG | 2526 | CTGGTTCCTTAGCAAATCTGAGTTC |
| 1221 | AACCCCCACCCTCGCAGGG | 1874 | GAAGACACAAAGTGATGTGGGC | 2527 | TGGTTCCTTAGCAAATCTGAGTTCC |
| 1222 | CCACCCTCGCAGGGCCGGT | 1875 | AAGACACAAAGTGATGTGGGCA | 2528 | GGTTCCTTAGCAAATCTGAGTTCCA |
| 1223 | CACCCTCGCAGGGCCGGTG | 1876 | AGACACAAAGTGATGTGGGCAA | 2529 | GTTCCTTAGCAAATCTGAGTTCCAG |
| 1224 | ACCCTCGCAGGGCCGGTGG | 1877 | GACACAAAGTGATGTGGGCAAG | 2530 | TTCCTTAGCAAATCTGAGTTCCAGT |
| 1225 | CCTCGCAGGGCCGGTGGGA | 1878 | ACACAAAGTGATGTGGGCAAGT | 2531 | TCCTTAGCAAATCTGAGTTCCAGTC |
| 1226 | CTCGCAGGGCCGGTGGGAA | 1879 | CACAAAGTGATGTGGGCAAGTG | 2532 | CCTTAGCAAATCTGAGTTCCAGTCC |
| 1227 | TCGCAGGGCCGGTGGGAAG | 1880 | ACAAAGTGATGTGGGCAAGTGC | 2533 | CTTAGCAAATCTGAGTTCCAGTCCC |
| 1228 | CGCAGGGCCGGTGGGAAGA | 1881 | CAAAGTGATGTGGGCAAGTGCC | 2534 | TTAGCAAATCTGAGTTCCAGTCCCA |
| 1229 | GCAGGGCCGGTGGGAAGAC | 1882 | AAAGTGATGTGGGCAAGTGCCA | 2535 | TAGCAAATCTGAGTTCCAGTCCCAG |
| 1230 | CAGGGCCGGTGGGAAGACA | 1883 | AAGTGATGTGGGCAAGTGCCAG | 2536 | AGCAAATCTGAGTTCCAGTCCCAGG |
| 1231 | AGGGCCGGTGGGAAGACAC | 1884 | AGTGATGTGGGCAAGTGCCAGG | 2537 | GCAAATCTGAGTTCCAGTCCCAGGT |
| 1232 | GGGCCGGTGGGAAGACACA | 1885 | GTGATGTGGGCAAGTGCCAGGC | 2538 | CAAATCTGAGTTCCAGTCCCAGGTC |
| 1233 | GGCCGGTGGGAAGACACAA | 1886 | TGATGTGGGCAAGTGCCAGGCC | 2539 | AAATCTGAGTTCCAGTCCCAGGTCC |
| 1234 | GCCGGTGGGAAGACACAAA | 1887 | GATGTGGGCAAGTGCCAGGCCC | 2540 | AATCTGAGTTCCAGTCCCAGGTCCA |
| 1235 | CCGGTGGGAAGACACAAAG | 1888 | ATGTGGGCAAGTGCCAGGCCCA | 2541 | ATCTGAGTTCCAGTCCCAGGTCCAC |
| 1236 | CGGTGGGAAGACACAAAGT | 1889 | TGTGGGCAAGTGCCAGGCCCAC | 2542 | TCTGAGTTCCAGTCCCAGGTCCACT |
| 1237 | GACACAAAGTGATGTGGGC | 1890 | GTGGGCAAGTGCCAGGCCCACA | 2543 | CTGAGTTCCAGTCCCAGGTCCACTA |
| 1238 | ACACAAAGTGATGTGGGCA | 1891 | TGGGCAAGTGCCAGGCCCACAT | 2544 | TGAGTTCCAGTCCCAGGTCCACTAC |
| 1239 | CACAAAGTGATGTGGGCAA | 1892 | GGGCAAGTGCCAGGCCCACATG | 2545 | GAGTTCCAGTCCCAGGTCCACTACT |
| 1240 | AAGTGATGTGGGCAAGTGC | 1893 | GGCAAGTGCCAGGCCCACATGG | 2546 | AGTTCCAGTCCCAGGTCCACTACTA |
| 1241 | AGTGATGTGGGCAAGTGCC | 1894 | GCAAGTGCCAGGCCCACATGGT | 2547 | GTTCCAGTCCCAGGTCCACTACTAT |
| 1242 | GTGATGTGGGCAAGTGCCA | 1895 | CAAGTGCCAGGCCCACATGGTA | 2548 | TTCCAGTCCCAGGTCCACTACTATT |
| 1243 | TGATGTGGGCAAGTGCCAG | 1896 | AAGTGCCAGGCCCACATGGTAA | 2549 | TCCAGTCCCAGGTCCACTACTATTA |
| 1244 | GATGTGGGCAAGTGCCAGG | 1897 | AGTGCCAGGCCCACATGGTAAG | 2550 | CCAGTCCCAGGTCCACTACTATTAG |
| 1245 | TGTGGGCAAGTGCCAGGCC | 1898 | GTGCCAGGCCCACATGGTAAGT | 2551 | CAGTCCCAGGTCCACTACTATTAGC |
| 1246 | GGGCAAGTGCCAGGCCCAC | 1899 | TGCCAGGCCCACATGGTAAGTA | 2552 | AGTCCCAGGTCCACTACTATTAGCT |
| 1247 | GCAAGTGCCAGGCCCACAT | 1900 | GCCAGGCCCACATGGTAAGTAC | 2553 | GTCCCAGGTCCACTACTATTAGCTG |
| 1248 | CAAGTGCCAGGCCCACATG | 1901 | CCAGGCCCACATGGTAAGTACC | 2554 | TCCCAGGTCCACTACTATTAGCTGA |
| 1249 | CAGGCCCACATGGTAAGTA | 1902 | CAGGCCCACATGGTAAGTACCC | 2555 | CCCAGGTCCACTACTATTAGCTGAG |
| 1250 | GGTAAGTACCCAACTAATC | 1903 | AGGCCCACATGGTAAGTACCCA | 2556 | CCAGGTCCACTACTATTAGCTGAGT |
| 1251 | GTAAGTACCCAACTAATCT | 1904 | GGCCCACATGGTAAGTACCCAA | 2557 | CAGGTCCACTACTATTAGCTGAGTG |
| 1252 | TAAGTACCCAACTAATCTC | 1905 | GCCCACATGGTAAGTACCCAAC | 2558 | AGGTCCACTACTATTAGCTGAGTGA |
| 1253 | AAGTACCCAACTAATCTCG | 1906 | CCCACATGGTAAGTACCCAACT | 2559 | GGTCCACTACTATTAGCTGAGTGAC |
| 1254 | AGTACCCAACTAATCTCGC | 1907 | CCACATGGTAAGTACCCAACTA | 2560 | GTCCACTACTATTAGCTGAGTGACG |
| 1255 | GTACCCAACTAATCTCGCC | 1908 | CATGGTAAGTACCCAACTAATC | 2561 | TCCACTACTATTAGCTGAGTGACGC |
| 1256 | TACCCAACTAATCTCGCCC | 1909 | ATGGTAAGTACCCAACTAATCT | 2562 | CCACTACTATTAGCTGAGTGACGCT |
| 1257 | ACCCAACTAATCTCGCCCC | 1910 | TGGTAAGTACCCAACTAATCTC | 2563 | CACTACTATTAGCTGAGTGACGCTT |
| 1258 | CCCAACTAATCTCGCCCCT | 1911 | GGTAAGTACCCAACTAATCTCG | 2564 | ACTACTATTAGCTGAGTGACGCTTC |
| 1259 | CCAACTAATCTCGCCCCTC | 1912 | GTAAGTACCCAACTAATCTCGC | 2565 | CTACTATTAGCTGAGTGACGCTTCC |
| 1260 | CAACTAATCTCGCCCCTCT | 1913 | TAAGTACCCAACTAATCTCGCC | 2566 | TACTATTAGCTGAGTGACGCTTCCA |
| 1261 | AACTAATCTCGCCCCTCTC | 1914 | AAGTACCCAACTAATCTCGCCC | 2567 | ACTATTAGCTGAGTGACGCTTCCAG |
| 1262 | ACTAATCTCGCCCCTCTCA | 1915 | AGTACCCAACTAATCTCGCCCC | 2568 | CTATTAGCTGAGTGACGCTTCCAGC |
| 1263 | CTAATCTCGCCCCTCTCAG | 1916 | GTACCCAACTAATCTCGCCCCT | 2569 | TATTAGCTGAGTGACGCTTCCAGCC |
| 1264 | TAATCTCGCCCCTCTCAGG | 1917 | TACCCAACTAATCTCGCCCCTC | 2570 | ATTAGCTGAGTGACGCTTCCAGCCC |
| 1265 | AATCTCGCCCCTCTCAGGA | 1918 | ACCCAACTAATCTCGCCCCTCT | 2571 | TTAGCTGAGTGACGCTTCCAGCCCG |
| 1266 | ATCTCGCCCCTCTCAGGAC | 1919 | CCCAACTAATCTCGCCCCTCTC | 2572 | TAGCTGAGTGACGCTTCCAGCCCGT |
| 1267 | TCTCGCCCCTCTCAGGACC | 1920 | CCAACTAATCTCGCCCCTCTCA | 2573 | AGCTGAGTGACGCTTCCAGCCCGTT |
| 1268 | TCGCCCCTCTCAGGACCTA | 1921 | CAACTAATCTCGCCCCTCTCAG | 2574 | GCTGAGTGACGCTTCCAGCCCGTTT |
| 1269 | CGCCCCTCTCAGGACCTAC | 1922 | AACTAATCTCGCCCCTCTCAGG | 2575 | CTGAGTGACGCTTCCAGCCCGTTTC |
| 1270 | AAATTACCTAGAAATAAGGT | 1923 | ACTAATCTCGCCCCTCTCAGGA | 2576 | TGAGTGACGCTTCCAGCCCGTTTCC |
| 1271 | AATTACCTAGAAATAAGGTT | 1924 | CTAATCTCGCCCCTCTCAGGAC | 2577 | GAGTGACGCTTCCAGCCCGTTTCCC |
| 1272 | ATTACCTAGAAATAAGGTTT | 1925 | TAATCTCGCCCCTCTCAGGACC | 2578 | AGTGACGCTTCCAGCCCGTTTCCCC |
| 1273 | TACCTAGAAATAAGGTTTCT | 1926 | AATCTCGCCCCTCTCAGGACCT | 2579 | GTGACGCTTCCAGCCCGTTTCCCCC |
| 1274 | ACCTAGAAATAAGGTTTCTT | 1927 | ATCTCGCCCCTCTCAGGACCTA | 2580 | TGACGCTTCCAGCCCGTTTCCCCCG |
| 1275 | CCTAGAAATAAGGTTTCTTT | 1928 | TCTCGCCCCTCTCAGGACCTAC | 2581 | GACGCTTCCAGCCCGTTTCCCCCGC |
| 1276 | CTAGAAATAAGGTTTCTTTA | 1929 | TCTTTTAAAAATTACCTAGAAAT | 2582 | ACGCTTCCAGCCCGTTTCCCCCGCC |
| 1277 | TAGAAATAAGGTTTCTTTAA | 1930 | TTTAAAAATTACCTAGAAATAAG | 2583 | CGCTTCCAGCCCGTTTCCCCCGCCT |
| 1278 | AAATAAGGTTTCTTTAATTG | 1931 | TTAAAAATTACCTAGAAATAAGG | 2584 | GCTTCCAGCCCGTTTCCCCCGCCTG |
| 1279 | AATAAGGTTTCTTTAATTGC | 1932 | TAAAAATTACCTAGAAATAAGGT | 2585 | CTTCCAGCCCGTTTCCCCCGCCTGG |
| 1280 | ATAAGGTTTCTTTAATTGCT | 1933 | AAAAATTACCTAGAAATAAGGTT | 2586 | TTCCAGCCCGTTTCCCCCGCCTGGA |
| 1281 | TAAGGTTTCTTTAATTGCTG | 1934 | AAAATTACCTAGAAATAAGGTTT | 2587 | TCCAGCCCGTTTCCCCCGCCTGGAA |
| 1282 | AAGGTTTCTTTAATTGCTGG | 1935 | AAATTACCTAGAAATAAGGTTTC | 2588 | CCAGCCCGTTTCCCCCGCCTGGAAA |
| 1283 | GGTTTCTTTAATTGCTGGTT | 1936 | AATTACCTAGAAATAAGGTTTCT | 2589 | CAGCCCGTTTCCCCCGCCTGGAAAC |
| 1284 | GTTTCTTTAATTGCTGGTTA | 1937 | ATTACCTAGAAATAAGGTTTCTT | 2590 | AGCCCGTTTCCCCCGCCTGGAAACT |
| 1285 | TTTCTTTAATTGCTGGTTAA | 1938 | TTACCTAGAAATAAGGTTTCTTT | 2591 | GCCCGTTTCCCCCGCCTGGAAACTG |
| 1286 | TTCTTTAATTGCTGGTTAAA | 1939 | TACCTAGAAATAAGGTTTCTTTA | 2592 | CCCGTTTCCCCCGCCTGGAAACTGA |
| 1287 | TCTTTAATTGCTGGTTAAAA | 1940 | ACCTAGAAATAAGGTTTCTTTAA | 2593 | CCGTTTCCCCCGCCTGGAAACTGAG |
| 1288 | TTAATTGCTGGTTAAAATGC | 1941 | CCTAGAAATAAGGTTTCTTTAAT | 2594 | CGTTTCCCCCGCCTGGAAACTGAGG |
| 1289 | TAATTGCTGGTTAAAATGCT | 1942 | CTAGAAATAAGGTTTCTTTAATT | 2595 | GTTTCCCCCGCCTGGAAACTGAGGA |
| 1290 | AATTGCTGGTTAAAATGCTC | 1943 | TAGAAATAAGGTTTCTTTAATTG | 2596 | TTTCCCCCGCCTGGAAACTGAGGAC |
| 1291 | TTGCTGGTTAAAATGCTCCC | 1944 | AGAAATAAGGTTTCTTTAATTGC | 2597 | TTCCCCCGCCTGGAAACTGAGGACG |
| 1292 | TGCTGGTTAAAATGCTCCCG | 1945 | GAAATAAGGTTTCTTTAATTGCT | 2598 | TCCCCCGCCTGGAAACTGAGGACGG |
| 1293 | GCTGGTTAAAATGCTCCCGT | 1946 | AAATAAGGTTTCTTTAATTGCTG | 2599 | CCCCCGCCTGGAAACTGAGGACGGC |
| 1294 | CTGGTTAAAATGCTCCCGTG | 1947 | AATAAGGTTTCTTTAATTGCTGG | 2600 | CCCCGCCTGGAAACTGAGGACGGCA |
| 1295 | TGGTTAAAATGCTCCCGTGC | 1948 | ATAAGGTTTCTTTAATTGCTGGT | 2601 | CCCGCCTGGAAACTGAGGACGGCAA |
| 1296 | GTTAAAATGCTCCCGTGCAG | 1949 | TAAGGTTTCTTTAATTGCTGGTT | 2602 | CCGCCTGGAAACTGAGGACGGCAAC |
| 1297 | AAAATGCTCCCGTGCAGAAA | 1950 | AAGGTTTCTTTAATTGCTGGTTA | 2603 | CGCCTGGAAACTGAGGACGGCAACC |
| 1298 | AAATGCTCCCGTGCAGAAAA | 1951 | AGGTTTCTTTAATTGCTGGTTAA | 2604 | GCCTGGAAACTGAGGACGGCAACCC |
| 1299 | ATGCTCCCGTGCAGAAAACA | 1952 | GGTTTCTTTAATTGCTGGTTAAA | 2605 | CCTGGAAACTGAGGACGGCAACCCC |
| 1300 | TGCTCCCGTGCAGAAAACAG | 1953 | GTTTCTTTAATTGCTGGTTAAAA | 2606 | CTGGAAACTGAGGACGGCAACCCCC |
| 1301 | GCTCCCGTGCAGAAAACAGG | 1954 | TTTCTTTAATTGCTGGTTAAAAT | 2607 | TGGAAACTGAGGACGGCAACCCCCA |
| 1302 | CTCCCGTGCAGAAAACAGGA | 1955 | TTCTTTAATTGCTGGTTAAAATG | 2608 | GGAAACTGAGGACGGCAACCCCCAC |
| 1303 | CCCGTGCAGAAAACAGGAAA | 1956 | TCTTTAATTGCTGGTTAAAATGC | 2609 | GAAACTGAGGACGGCAACCCCCACC |
| 1304 | CCGTGCAGAAAACAGGAAAG | 1957 | CTTTAATTGCTGGTTAAAATGCT | 2610 | AAACTGAGGACGGCAACCCCCACCC |
| 1305 | CGTGCAGAAAACAGGAAAGA | 1958 | TTTAATTGCTGGTTAAAATGCTC | 2611 | AACTGAGGACGGCAACCCCCACCCT |
| 1306 | GTGCAGAAAACAGGAAAGAA | 1959 | TTAATTGCTGGTTAAAATGCTCC | 2612 | ACTGAGGACGGCAACCCCCACCCTC |
| 1307 | AACAGGAAAGAACCTGCCTG | 1960 | TAATTGCTGGTTAAAATGCTCCC | 2613 | CTGAGGACGGCAACCCCCACCCTCG |
| 1308 | ACAGGAAAGAACCTGCCTGG | 1961 | AATTGCTGGTTAAAATGCTCCCG | 2614 | TGAGGACGGCAACCCCCACCCTCGC |
| 1309 | CAGGAAAGAACCTGCCTGGT | 1962 | ATTGCTGGTTAAAATGCTCCCGT | 2615 | GAGGACGGCAACCCCCACCCTCGCA |
| 1310 | AGGAAAGAACCTGCCTGGTT | 1963 | TTGCTGGTTAAAATGCTCCCGTG | 2616 | AGGACGGCAACCCCCACCCTCGCAG |
| 1311 | GAAAGAACCTGCCTGGTTCC | 1964 | TGCTGGTTAAAATGCTCCCGTGC | 2617 | GGACGGCAACCCCCACCCTCGCAGG |
| 1312 | AAAGAACCTGCCTGGTTCCT | 1965 | GCTGGTTAAAATGCTCCCGTGCA | 2618 | GACGGCAACCCCCACCCTCGCAGGG |
| 1313 | AAGAACCTGCCTGGTTCCTT | 1966 | CTGGTTAAAATGCTCCCGTGCAG | 2619 | ACGGCAACCCCCACCCTCGCAGGGC |
| 1314 | AGAACCTGCCTGGTTCCTTA | 1967 | TGGTTAAAATGCTCCCGTGCAGA | 2620 | CGGCAACCCCCACCCTCGCAGGGCC |
| 1315 | GAACCTGCCTGGTTCCTTAG | 1968 | GGTTAAAATGCTCCCGTGCAGAA | 2621 | GGCAACCCCCACCCTCGCAGGGCCG |
| 1316 | ACCTGCCTGGTTCCTTAGCA | 1969 | GTTAAAATGCTCCCGTGCAGAAA | 2622 | GCAACCCCCACCCTCGCAGGGCCGG |
| 1317 | CCTGCCTGGTTCCTTAGCAA | 1970 | TTAAAATGCTCCCGTGCAGAAAA | 2623 | CAACCCCCACCCTCGCAGGGCCGGT |
| 1318 | CTGCCTGGTTCCTTAGCAAA | 1971 | TAAAATGCTCCCGTGCAGAAAAC | 2624 | AACCCCCACCCTCGCAGGGCCGGTG |
| 1319 | TGCCTGGTTCCTTAGCAAAT | 1972 | AAAATGCTCCCGTGCAGAAAACA | 2625 | ACCCCCACCCTCGCAGGGCCGGTGG |
| 1320 | GCCTGGTTCCTTAGCAAATC | 1973 | AAATGCTCCCGTGCAGAAAACAG | 2626 | CCCCCACCCTCGCAGGGCCGGTGGG |
| 1321 | CTGGTTCCTTAGCAAATCTG | 1974 | AATGCTCCCGTGCAGAAAACAGG | 2627 | CCCCACCCTCGCAGGGCCGGTGGGA |
| 1322 | TGGTTCCTTAGCAAATCTGA | 1975 | ATGCTCCCGTGCAGAAAACAGGA | 2628 | CCCACCCTCGCAGGGCCGGTGGGAA |
| 1323 | GTTCCTTAGCAAATCTGAGT | 1976 | TGCTCCCGTGCAGAAAACAGGAA | 2629 | CCACCCTCGCAGGGCCGGTGGGAAG |
| 1324 | CCTTAGCAAATCTGAGTTCC | 1977 | GCTCCCGTGCAGAAAACAGGAAA | 2630 | CACCCTCGCAGGGCCGGTGGGAAGA |
| 1325 | CTTAGCAAATCTGAGTTCCA | 1978 | CTCCCGTGCAGAAAACAGGAAAG | 2631 | ACCCTCGCAGGGCCGGTGGGAAGAC |
| 1326 | TTAGCAAATCTGAGTTCCAG | 1979 | TCCCGTGCAGAAAACAGGAAAGA | 2632 | CCCTCGCAGGGCCGGTGGGAAGACA |
| 1327 | TAGCAAATCTGAGTTCCAGT | 1980 | CCCGTGCAGAAAACAGGAAAGAA | 2633 | CCTCGCAGGGCCGGTGGGAAGACAC |
| 1328 | AATCTGAGTTCCAGTCCCAG | 1981 | CCGTGCAGAAAACAGGAAAGAAC | 2634 | CTCGCAGGGCCGGTGGGAAGACACA |
| 1329 | GTTCCAGTCCCAGGTCCACT | 1982 | CGTGCAGAAAACAGGAAAGAACC | 2635 | TCGCAGGGCCGGTGGGAAGACACAA |
| 1330 | TTCCAGTCCCAGGTCCACTA | 1983 | GTGCAGAAAACAGGAAAGAACCT | 2636 | CGCAGGGCCGGTGGGAAGACACAAA |
| 1331 | TCCAGTCCCAGGTCCACTAC | 1984 | TGCAGAAAACAGGAAAGAACCTG | 2637 | GCAGGGCCGGTGGGAAGACACAAAG |
| 1332 | CCAGTCCCAGGTCCACTACT | 1985 | GCAGAAAACAGGAAAGAACCTGC | 2638 | CAGGGCCGGTGGGAAGACACAAAGT |
| 1333 | GTCCCAGGTCCACTACTATT | 1986 | CAGAAAACAGGAAAGAACCTGCC | 2639 | AGGGCCGGTGGGAAGACACAAAGTG |
| 1334 | CCCAGGTCCACTACTATTAG | 1987 | AGAAAACAGGAAAGAACCTGCCT | 2640 | GGGCCGGTGGGAAGACACAAAGTGA |
| 1335 | CCAGGTCCACTACTATTAGC | 1988 | GAAAACAGGAAAGAACCTGCCTG | 2641 | GGCCGGTGGGAAGACACAAAGTGAT |
| 1336 | CAGGTCCACTACTATTAGCT | 1989 | AAAACAGGAAAGAACCTGCCTGG | 2642 | GCCGGTGGGAAGACACAAAGTGATG |
| 1337 | AGGTCCACTACTATTAGCTG | 1990 | AAACAGGAAAGAACCTGCCTGGT | 2643 | CCGGTGGGAAGACACAAAGTGATGT |
| 1338 | GGTCCACTACTATTAGCTGA | 1991 | AACAGGAAAGAACCTGCCTGGTT | 2644 | CGGTGGGAAGACACAAAGTGATGTG |
| 1339 | TCCACTACTATTAGCTGAGT | 1992 | ACAGGAAAGAACCTGCCTGGTTC | 2645 | GGTGGGAAGACACAAAGTGATGTGG |
| 1340 | TACTATTAGCTGAGTGACGC | 1993 | CAGGAAAGAACCTGCCTGGTTCC | 2646 | GTGGGAAGACACAAAGTGATGTGGG |
| 1341 | ACTATTAGCTGAGTGACGCT | 1994 | AGGAAAGAACCTGCCTGGTTCCT | 2647 | TGGGAAGACACAAAGTGATGTGGGC |
| 1342 | CTATTAGCTGAGTGACGCTT | 1995 | GGAAAGAACCTGCCTGGTTCCTT | 2648 | GGGAAGACACAAAGTGATGTGGGCA |
| 1343 | TATTAGCTGAGTGACGCTTC | 1996 | GAAAGAACCTGCCTGGTTCCTTA | 2649 | GGAAGACACAAAGTGATGTGGGCAA |
| 1344 | ATTAGCTGAGTGACGCTTCC | 1997 | AAAGAACCTGCCTGGTTCCTTAG | 2650 | GAAGACACAAAGTGATGTGGGCAAG |
| 1345 | TAGCTGAGTGACGCTTCCAG | 1998 | AAGAACCTGCCTGGTTCCTTAGC | 2651 | AAGACACAAAGTGATGTGGGCAAGT |
| 1346 | AGCTGAGTGACGCTTCCAGC | 1999 | AGAACCTGCCTGGTTCCTTAGCA | 2652 | AGACACAAAGTGATGTGGGCAAGTG |
| 1347 | GCTGAGTGACGCTTCCAGCC | 2000 | GAACCTGCCTGGTTCCTTAGCAA | 2653 | GACACAAAGTGATGTGGGCAAGTGC |
| 1348 | CTGAGTGACGCTTCCAGCCC | 2001 | AACCTGCCTGGTTCCTTAGCAAA | 2654 | ACACAAAGTGATGTGGGCAAGTGCC |
| 1349 | TGAGTGACGCTTCCAGCCCG | 2002 | ACCTGCCTGGTTCCTTAGCAAAT | 2655 | CACAAAGTGATGTGGGCAAGTGCCA |
| 1350 | GAGTGACGCTTCCAGCCCGT | 2003 | CCTGCCTGGTTCCTTAGCAAATC | 2656 | ACAAAGTGATGTGGGCAAGTGCCAG |
| 1351 | GTGACGCTTCCAGCCCGTTT | 2004 | CTGCCTGGTTCCTTAGCAAATCT | 2657 | CAAAGTGATGTGGGCAAGTGCCAGG |
| 1352 | TGACGCTTCCAGCCCGTTTC | 2005 | TGCCTGGTTCCTTAGCAAATCTG | 2658 | AAAGTGATGTGGGCAAGTGCCAGGC |
| 1353 | GACGCTTCCAGCCCGTTTCC | 2006 | GCCTGGTTCCTTAGCAAATCTGA | 2659 | AAGTGATGTGGGCAAGTGCCAGGCC |
| 1354 | ACGCTTCCAGCCCGTTTCCC | 2007 | CCTGGTTCCTTAGCAAATCTGAG | 2660 | AGTGATGTGGGCAAGTGCCAGGCCC |
| 1355 | CGCTTCCAGCCCGTTTCCCC | 2008 | CTGGTTCCTTAGCAAATCTGAGT | 2661 | GTGATGTGGGCAAGTGCCAGGCCCA |
| 1356 | GCTTCCAGCCCGTTTCCCCC | 2009 | TGGTTCCTTAGCAAATCTGAGTT | 2662 | TGATGTGGGCAAGTGCCAGGCCCAC |
| 1357 | CTTCCAGCCCGTTTCCCCCG | 2010 | GGTTCCTTAGCAAATCTGAGTTC | 2663 | GATGTGGGCAAGTGCCAGGCCCACA |
| 1358 | TCCAGCCCGTTTCCCCCGCC | 2011 | GTTCCTTAGCAAATCTGAGTTCC | 2664 | ATGTGGGCAAGTGCCAGGCCCACAT |
| 1359 | CCAGCCCGTTTCCCCCGCCT | 2012 | TTCCTTAGCAAATCTGAGTTCCA | 2665 | TGTGGGCAAGTGCCAGGCCCACATG |
| 1360 | CAGCCCGTTTCCCCCGCCTG | 2013 | TCCTTAGCAAATCTGAGTTCCAG | 2666 | GTGGGCAAGTGCCAGGCCCACATGG |
| 1361 | AGCCCGTTTCCCCCGCCTGG | 2014 | CCTTAGCAAATCTGAGTTCCAGT | 2667 | TGGGCAAGTGCCAGGCCCACATGGT |
| 1362 | CCCGTTTCCCCCGCCTGGAA | 2015 | CTTAGCAAATCTGAGTTCCAGTC | 2668 | GGGCAAGTGCCAGGCCCACATGGTA |
| 1363 | CCGTTTCCCCCGCCTGGAAA | 2016 | TTAGCAAATCTGAGTTCCAGTCC | 2669 | GGCAAGTGCCAGGCCCACATGGTAA |
| 1364 | CGTTTCCCCCGCCTGGAAAC | 2017 | TAGCAAATCTGAGTTCCAGTCCC | 2670 | GCAAGTGCCAGGCCCACATGGTAAG |
| 1365 | GTTTCCCCCGCCTGGAAACT | 2018 | AGCAAATCTGAGTTCCAGTCCCA | 2671 | CAAGTGCCAGGCCCACATGGTAAGT |
| 1366 | TTTCCCCCGCCTGGAAACTG | 2019 | GCAAATCTGAGTTCCAGTCCCAG | 2672 | AAGTGCCAGGCCCACATGGTAAGTA |
| 1367 | TCCCCCGCCTGGAAACTGAG | 2020 | CAAATCTGAGTTCCAGTCCCAGG | 2673 | AGTGCCAGGCCCACATGGTAAGTAC |
| 1368 | CCCCCGCCTGGAAACTGAGG | 2021 | AAATCTGAGTTCCAGTCCCAGGT | 2674 | GTGCCAGGCCCACATGGTAAGTACC |
| 1369 | CCCGCCTGGAAACTGAGGAC | 2022 | AATCTGAGTTCCAGTCCCAGGTC | 2675 | TGCCAGGCCCACATGGTAAGTACCC |
| 1370 | CCGCCTGGAAACTGAGGACG | 2023 | ATCTGAGTTCCAGTCCCAGGTCC | 2676 | GCCAGGCCCACATGGTAAGTACCCA |
| 1371 | GCCTGGAAACTGAGGACGGC | 2024 | TCTGAGTTCCAGTCCCAGGTCCA | 2677 | CCAGGCCCACATGGTAAGTACCCAA |
| 1372 | CCTGGAAACTGAGGACGGCA | 2025 | TGAGTTCCAGTCCCAGGTCCACT | 2678 | CAGGCCCACATGGTAAGTACCCAAC |
| 1373 | CTGGAAACTGAGGACGGCAA | 2026 | GAGTTCCAGTCCCAGGTCCACTA | 2679 | AGGCCCACATGGTAAGTACCCAACT |
| 1374 | TGGAAACTGAGGACGGCAAC | 2027 | AGTTCCAGTCCCAGGTCCACTAC | 2680 | GGCCCACATGGTAAGTACCCAACTA |
| 1375 | AACTGAGGACGGCAACCCCC | 2028 | GTTCCAGTCCCAGGTCCACTACT | 2681 | GCCCACATGGTAAGTACCCAACTAA |
| 1376 | ACTGAGGACGGCAACCCCCA | 2029 | TTCCAGTCCCAGGTCCACTACTA | 2682 | CCCACATGGTAAGTACCCAACTAAT |
| 1377 | CTGAGGACGGCAACCCCCAC | 2030 | TCCAGTCCCAGGTCCACTACTAT | 2683 | CCACATGGTAAGTACCCAACTAATC |
| 1378 | GAGGACGGCAACCCCCACCC | 2031 | CCAGTCCCAGGTCCACTACTATT | 2684 | CACATGGTAAGTACCCAACTAATCT |
| 1379 | AGGACGGCAACCCCCACCCT | 2032 | CAGTCCCAGGTCCACTACTATTA | 2685 | ACATGGTAAGTACCCAACTAATCTC |
| 1380 | GGACGGCAACCCCCACCCTC | 2033 | AGTCCCAGGTCCACTACTATTAG | 2686 | CATGGTAAGTACCCAACTAATCTCG |
| 1381 | CGGCAACCCCCACCCTCGCA | 2034 | GTCCCAGGTCCACTACTATTAGC | 2687 | ATGGTAAGTACCCAACTAATCTCGC |
| 1382 | CAACCCCCACCCTCGCAGGG | 2035 | TCCCAGGTCCACTACTATTAGCT | 2688 | TGGTAAGTACCCAACTAATCTCGCC |
| 1383 | AACCCCCACCCTCGCAGGGC | 2036 | CCCAGGTCCACTACTATTAGCTG | 2689 | GGTAAGTACCCAACTAATCTCGCCC |
| 1384 | ACCCCCACCCTCGCAGGGCC | 2037 | CCAGGTCCACTACTATTAGCTGA | 2690 | GTAAGTACCCAACTAATCTCGCCCC |
| 1385 | CCCACCCTCGCAGGGCCGGT | 2038 | CAGGTCCACTACTATTAGCTGAG | 2691 | TAAGTACCCAACTAATCTCGCCCCT |
| 1386 | CCACCCTCGCAGGGCCGGTG | 2039 | AGGTCCACTACTATTAGCTGAGT | 2692 | AAGTACCCAACTAATCTCGCCCCTC |
| 1387 | CACCCTCGCAGGGCCGGTGG | 2040 | GGTCCACTACTATTAGCTGAGTG | 2693 | AGTACCCAACTAATCTCGCCCCTCT |
| 1388 | CCCTCGCAGGGCCGGTGGGA | 2041 | GTCCACTACTATTAGCTGAGTGA | 2694 | GTACCCAACTAATCTCGCCCCTCTC |
| 1389 | CCTCGCAGGGCCGGTGGGAA | 2042 | TCCACTACTATTAGCTGAGTGAC | 2695 | TACCCAACTAATCTCGCCCCTCTCA |
| 1390 | CTCGCAGGGCCGGTGGGAAG | 2043 | CCACTACTATTAGCTGAGTGACG | 2696 | ACCCAACTAATCTCGCCCCTCTCAG |
| 1391 | TCGCAGGGCCGGTGGGAAGA | 2044 | CACTACTATTAGCTGAGTGACGC | 2697 | CCCAACTAATCTCGCCCCTCTCAGG |
| 1392 | GCAGGGCCGGTGGGAAGACA | 2045 | ACTACTATTAGCTGAGTGACGCT | 2698 | CCAACTAATCTCGCCCCTCTCAGGA |
| 1393 | CAGGGCCGGTGGGAAGACAC | 2046 | CTACTATTAGCTGAGTGACGCTT | 2699 | CAACTAATCTCGCCCCTCTCAGGAC |
| 1394 | AGGGCCGGTGGGAAGACACA | 2047 | TACTATTAGCTGAGTGACGCTTC | 2700 | AACTAATCTCGCCCCTCTCAGGACC |
| 1395 | GGGCCGGTGGGAAGACACAA | 2048 | ACTATTAGCTGAGTGACGCTTCC | 2701 | ACTAATCTCGCCCCTCTCAGGACCT |
| 1396 | GGCCGGTGGGAAGACACAAA | 2049 | CTATTAGCTGAGTGACGCTTCCA | 2702 | CTAATCTCGCCCCTCTCAGGACCTA |
| 1397 | GCCGGTGGGAAGACACAAAG | 2050 | TATTAGCTGAGTGACGCTTCCAG | 2703 | TAATCTCGCCCCTCTCAGGACCTAC |
| 1398 | CGGTGGGAAGACACAAAGTG | 2051 | ATTAGCTGAGTGACGCTTCCAGC | 2704 | TCTTTTAAAAATTACCTAGAAATAAG |
| 1399 | TGGGAAGACACAAAGTGATG | 2052 | TTAGCTGAGTGACGCTTCCAGCC | 2705 | CTTTTAAAAATTACCTAGAAATAAGG |
| 1400 | AAGACACAAAGTGATGTGGG | 2053 | TAGCTGAGTGACGCTTCCAGCCC | 2706 | TTTTAAAAATTACCTAGAAATAAGGT |
| 1401 | AGACACAAAGTGATGTGGGC | 2054 | AGCTGAGTGACGCTTCCAGCCCG | 2707 | TTTAAAAATTACCTAGAAATAAGGTT |
| 1402 | ACACAAAGTGATGTGGGCAA | 2055 | GCTGAGTGACGCTTCCAGCCCGT | 2708 | TTAAAAATTACCTAGAAATAAGGTTT |
| 1403 | CACAAAGTGATGTGGGCAAG | 2056 | CTGAGTGACGCTTCCAGCCCGTT | 2709 | TAAAAATTACCTAGAAATAAGGTTTC |
| 1404 | CAAAGTGATGTGGGCAAGTG | 2057 | TGAGTGACGCTTCCAGCCCGTTT | 2710 | AAAAATTACCTAGAAATAAGGTTTCT |
| 1405 | AAGTGATGTGGGCAAGTGCC | 2058 | GAGTGACGCTTCCAGCCCGTTTC | 2711 | AAAATTACCTAGAAATAAGGTTTCTT |
| 1406 | AGTGATGTGGGCAAGTGCCA | 2059 | AGTGACGCTTCCAGCCCGTTTCC | 2712 | AAATTACCTAGAAATAAGGTTTCTTT |
| 1407 | GTGATGTGGGCAAGTGCCAG | 2060 | GTGACGCTTCCAGCCCGTTTCCC | 2713 | AATTACCTAGAAATAAGGTTTCTTTA |
| 1408 | TGATGTGGGCAAGTGCCAGG | 2061 | TGACGCTTCCAGCCCGTTTCCCC | 2714 | ATTACCTAGAAATAAGGTTTCTTTAA |
| 1409 | ATGTGGGCAAGTGCCAGGCC | 2062 | GACGCTTCCAGCCCGTTTCCCCC | 2715 | TTACCTAGAAATAAGGTTTCTTTAAT |
| 1410 | TGTGGGCAAGTGCCAGGCCC | 2063 | ACGCTTCCAGCCCGTTTCCCCCG | 2716 | TACCTAGAAATAAGGTTTCTTTAATT |
| 1411 | GTGGGCAAGTGCCAGGCCCA | 2064 | CGCTTCCAGCCCGTTTCCCCCGC | 2717 | ACCTAGAAATAAGGTTTCTTTAATTG |
| 1412 | TGGGCAAGTGCCAGGCCCAC | 2065 | GCTTCCAGCCCGTTTCCCCCGCC | 2718 | CCTAGAAATAAGGTTTCTTTAATTGC |
| 1413 | GGGCAAGTGCCAGGCCCACA | 2066 | CTTCCAGCCCGTTTCCCCCGCCT | 2719 | CTAGAAATAAGGTTTCTTTAATTGCT |
| 1414 | GGCAAGTGCCAGGCCCACAT | 2067 | TTCCAGCCCGTTTCCCCCGCCTG | 2720 | TAGAAATAAGGTTTCTTTAATTGCTG |
| 1415 | GCAAGTGCCAGGCCCACATG | 2068 | TCCAGCCCGTTTCCCCCGCCTGG | 2721 | AGAAATAAGGTTTCTTTAATTGCTGG |
| 1416 | CAAGTGCCAGGCCCACATGG | 2069 | CCAGCCCGTTTCCCCCGCCTGGA | 2722 | GAAATAAGGTTTCTTTAATTGCTGGT |
| 1417 | AGTGCCAGGCCCACATGGTA | 2070 | CAGCCCGTTTCCCCCGCCTGGAA | 2723 | AAATAAGGTTTCTTTAATTGCTGGTT |
| 1418 | GTGCCAGGCCCACATGGTAA | 2071 | AGCCCGTTTCCCCCGCCTGGAAA | 2724 | AATAAGGTTTCTTTAATTGCTGGTTA |
| 1419 | CCAGGCCCACATGGTAAGTA | 2072 | GCCCGTTTCCCCCGCCTGGAAAC | 2725 | ATAAGGTTTCTTTAATTGCTGGTTAA |
| 1420 | CAGGCCCACATGGTAAGTAC | 2073 | CCCGTTTCCCCCGCCTGGAAACT | 2726 | TAAGGTTTCTTTAATTGCTGGTTAAA |
| 1421 | AGGCCCACATGGTAAGTACC | 2074 | CCGTTTCCCCCGCCTGGAAACTG | 2727 | AAGGTTTCTTTAATTGCTGGTTAAAA |
| 1422 | CCCACATGGTAAGTACCCAA | 2075 | CGTTTCCCCCGCCTGGAAACTGA | 2728 | AGGTTTCTTTAATTGCTGGTTAAAAT |
| 1423 | GGTAAGTACCCAACTAATCT | 2076 | GTTTCCCCCGCCTGGAAACTGAG | 2729 | GGTTTCTTTAATTGCTGGTTAAAATG |
| 1424 | GTAAGTACCCAACTAATCTC | 2077 | TTTCCCCCGCCTGGAAACTGAGG | 2730 | GTTTCTTTAATTGCTGGTTAAAATGC |
| 1425 | TAAGTACCCAACTAATCTCG | 2078 | TTCCCCCGCCTGGAAACTGAGGA | 2731 | TTTCTTTAATTGCTGGTTAAAATGCT |
| 1426 | AAGTACCCAACTAATCTCGC | 2079 | TCCCCCGCCTGGAAACTGAGGAC | 2732 | TTCTTTAATTGCTGGTTAAAATGCTC |
| 1427 | GTACCCAACTAATCTCGCCC | 2080 | CCCCCGCCTGGAAACTGAGGACG | 2733 | TCTTTAATTGCTGGTTAAAATGCTCC |
| 1428 | TACCCAACTAATCTCGCCCC | 2081 | CCCCGCCTGGAAACTGAGGACGG | 2734 | CTTTAATTGCTGGTTAAAATGCTCCC |
| 1429 | ACCCAACTAATCTCGCCCCT | 2082 | CCCGCCTGGAAACTGAGGACGGC | 2735 | TTTAATTGCTGGTTAAAATGCTCCCG |
| 1430 | CCCAACTAATCTCGCCCCTC | 2083 | CCGCCTGGAAACTGAGGACGGCA | 2736 | TTAATTGCTGGTTAAAATGCTCCCGT |
| 1431 | CCAACTAATCTCGCCCCTCT | 2084 | CGCCTGGAAACTGAGGACGGCAA | 2737 | TAATTGCTGGTTAAAATGCTCCCGTG |
| 1432 | CAACTAATCTCGCCCCTCTC | 2085 | GCCTGGAAACTGAGGACGGCAAC | 2738 | AATTGCTGGTTAAAATGCTCCCGTGC |
| 1433 | AACTAATCTCGCCCCTCTCA | 2086 | CCTGGAAACTGAGGACGGCAACC | 2739 | ATTGCTGGTTAAAATGCTCCCGTGCA |
| 1434 | ACTAATCTCGCCCCTCTCAG | 2087 | CTGGAAACTGAGGACGGCAACCC | 2740 | TTGCTGGTTAAAATGCTCCCGTGCAG |
| 1435 | TAATCTCGCCCCTCTCAGGA | 2088 | TGGAAACTGAGGACGGCAACCCC | 2741 | TGCTGGTTAAAATGCTCCCGTGCAGA |
| 1436 | AATCTCGCCCCTCTCAGGAC | 2089 | GGAAACTGAGGACGGCAACCCCC | 2742 | GCTGGTTAAAATGCTCCCGTGCAGAA |
| 1437 | ATCTCGCCCCTCTCAGGACC | 2090 | GAAACTGAGGACGGCAACCCCCA | 2743 | CTGGTTAAAATGCTCCCGTGCAGAAA |
| 1438 | TCTCGCCCCTCTCAGGACCT | 2091 | AAACTGAGGACGGCAACCCCCAC | 2744 | TGGTTAAAATGCTCCCGTGCAGAAAA |
| 1439 | CTCGCCCCTCTCAGGACCTA | 2092 | AACTGAGGACGGCAACCCCCACC | 2745 | GGTTAAAATGCTCCCGTGCAGAAAAC |
| 1440 | TCGCCCCTCTCAGGACCTAC | 2093 | ACTGAGGACGGCAACCCCCACCC | 2746 | GTTAAAATGCTCCCGTGCAGAAAACA |
| 1441 | TCTTTTAAAAATTACCTAGAA | 2094 | CTGAGGACGGCAACCCCCACCCT | 2747 | TTAAAATGCTCCCGTGCAGAAAACAG |
| 1442 | AAAATTACCTAGAAATAAGGT | 2095 | TGAGGACGGCAACCCCCACCCTC | 2748 | TAAAATGCTCCCGTGCAGAAAACAGG |
| 1443 | AAATTACCTAGAAATAAGGTT | 2096 | GAGGACGGCAACCCCCACCCTCG | 2749 | AAAATGCTCCCGTGCAGAAAACAGGA |
| 1444 | AATTACCTAGAAATAAGGTTT | 2097 | AGGACGGCAACCCCCACCCTCGC | 2750 | AAATGCTCCCGTGCAGAAAACAGGAA |
| 1445 | ATTACCTAGAAATAAGGTTTC | 2098 | GGACGGCAACCCCCACCCTCGCA | 2751 | AATGCTCCCGTGCAGAAAACAGGAAA |
| 1446 | TTACCTAGAAATAAGGTTTCT | 2099 | GACGGCAACCCCCACCCTCGCAG | 2752 | ATGCTCCCGTGCAGAAAACAGGAAAG |
| 1447 | TACCTAGAAATAAGGTTTCTT | 2100 | ACGGCAACCCCCACCCTCGCAGG | 2753 | TGCTCCCGTGCAGAAAACAGGAAAGA |
| 1448 | ACCTAGAAATAAGGTTTCTTT | 2101 | CGGCAACCCCCACCCTCGCAGGG | 2754 | GCTCCCGTGCAGAAAACAGGAAAGAA |
| 1449 | CCTAGAAATAAGGTTTCTTTA | 2102 | GGCAACCCCCACCCTCGCAGGGC | 2755 | CTCCCGTGCAGAAAACAGGAAAGAAC |
| 1450 | CTAGAAATAAGGTTTCTTTAA | 2103 | GCAACCCCCACCCTCGCAGGGCC | 2756 | TCCCGTGCAGAAAACAGGAAAGAACC |
| 1451 | TAGAAATAAGGTTTCTTTAAT | 2104 | CAACCCCCACCCTCGCAGGGCCG | 2757 | CCCGTGCAGAAAACAGGAAAGAACCT |
| 1452 | AGAAATAAGGTTTCTTTAATT | 2105 | AACCCCCACCCTCGCAGGGCCGG | 2758 | CCGTGCAGAAAACAGGAAAGAACCTG |
| 1453 | GAAATAAGGTTTCTTTAATTG | 2106 | ACCCCCACCCTCGCAGGGCCGGT | 2759 | CGTGCAGAAAACAGGAAAGAACCTGC |
| 1454 | AAATAAGGTTTCTTTAATTGC | 2107 | CCCCCACCCTCGCAGGGCCGGTG | 2760 | GTGCAGAAAACAGGAAAGAACCTGCC |
| 1455 | AATAAGGTTTCTTTAATTGCT | 2108 | CCCCACCCTCGCAGGGCCGGTGG | 2761 | TGCAGAAAACAGGAAAGAACCTGCCT |
| 1456 | ATAAGGTTTCTTTAATTGCTG | 2109 | CCCACCCTCGCAGGGCCGGTGGG | 2762 | GCAGAAAACAGGAAAGAACCTGCCTG |
| 1457 | TAAGGTTTCTTTAATTGCTGG | 2110 | CCACCCTCGCAGGGCCGGTGGGA | 2763 | CAGAAAACAGGAAAGAACCTGCCTGG |
| 1458 | AAGGTTTCTTTAATTGCTGGT | 2111 | CACCCTCGCAGGGCCGGTGGGAA | 2764 | AGAAAACAGGAAAGAACCTGCCTGGT |
| 1459 | AGGTTTCTTTAATTGCTGGTT | 2112 | ACCCTCGCAGGGCCGGTGGGAAG | 2765 | GAAAACAGGAAAGAACCTGCCTGGTT |
| 1460 | GGTTTCTTTAATTGCTGGTTA | 2113 | CCCTCGCAGGGCCGGTGGGAAGA | 2766 | AAAACAGGAAAGAACCTGCCTGGTTC |
| 1461 | GTTTCTTTAATTGCTGGTTAA | 2114 | CCTCGCAGGGCCGGTGGGAAGAC | 2767 | AAACAGGAAAGAACCTGCCTGGTTCC |
| 1462 | TTTCTTTAATTGCTGGTTAAA | 2115 | CTCGCAGGGCCGGTGGGAAGACA | 2768 | AACAGGAAAGAACCTGCCTGGTTCCT |
| 1463 | TTCTTTAATTGCTGGTTAAAA | 2116 | TCGCAGGGCCGGTGGGAAGACAC | 2769 | ACAGGAAAGAACCTGCCTGGTTCCTT |
| 1464 | TCTTTAATTGCTGGTTAAAAT | 2117 | CGCAGGGCCGGTGGGAAGACACA | 2770 | CAGGAAAGAACCTGCCTGGTTCCTTA |
| 1465 | CTTTAATTGCTGGTTAAAATG | 2118 | GCAGGGCCGGTGGGAAGACACAA | 2771 | AGGAAAGAACCTGCCTGGTTCCTTAG |
| 1466 | TTTAATTGCTGGTTAAAATGC | 2119 | CAGGGCCGGTGGGAAGACACAAA | 2772 | GGAAAGAACCTGCCTGGTTCCTTAGC |
| 1467 | TTAATTGCTGGTTAAAATGCT | 2120 | AGGGCCGGTGGGAAGACACAAAG | 2773 | GAAAGAACCTGCCTGGTTCCTTAGCA |
| 1468 | TAATTGCTGGTTAAAATGCTC | 2121 | GGGCCGGTGGGAAGACACAAAGT | 2774 | AAAGAACCTGCCTGGTTCCTTAGCAA |
| 1469 | AATTGCTGGTTAAAATGCTCC | 2122 | GGCCGGTGGGAAGACACAAAGTG | 2775 | AAGAACCTGCCTGGTTCCTTAGCAAA |
| 1470 | ATTGCTGGTTAAAATGCTCCC | 2123 | GCCGGTGGGAAGACACAAAGTGA | 2776 | AGAACCTGCCTGGTTCCTTAGCAAAT |
| 1471 | TTGCTGGTTAAAATGCTCCCG | 2124 | CCGGTGGGAAGACACAAAGTGAT | 2777 | GAACCTGCCTGGTTCCTTAGCAAATC |
| 1472 | TGCTGGTTAAAATGCTCCCGT | 2125 | CGGTGGGAAGACACAAAGTGATG | 2778 | AACCTGCCTGGTTCCTTAGCAAATCT |
| 1473 | GCTGGTTAAAATGCTCCCGTG | 2126 | GGTGGGAAGACACAAAGTGATGT | 2779 | ACCTGCCTGGTTCCTTAGCAAATCTG |
| 1474 | CTGGTTAAAATGCTCCCGTGC | 2127 | GTGGGAAGACACAAAGTGATGTG | 2780 | CCTGCCTGGTTCCTTAGCAAATCTGA |
| 1475 | TGGTTAAAATGCTCCCGTGCA | 2128 | TGGGAAGACACAAAGTGATGTGG | 2781 | CTGCCTGGTTCCTTAGCAAATCTGAG |
| 1476 | GGTTAAAATGCTCCCGTGCAG | 2129 | GGGAAGACACAAAGTGATGTGGG | 2782 | TGCCTGGTTCCTTAGCAAATCTGAGT |
| 1477 | GTTAAAATGCTCCCGTGCAGA | 2130 | GGAAGACACAAAGTGATGTGGGC | 2783 | GCCTGGTTCCTTAGCAAATCTGAGTT |
| 1478 | TAAAATGCTCCCGTGCAGAAA | 2131 | GAAGACACAAAGTGATGTGGGCA | 2784 | CCTGGTTCCTTAGCAAATCTGAGTTC |
| 1479 | AAAATGCTCCCGTGCAGAAAA | 2132 | AAGACACAAAGTGATGTGGGCAA | 2785 | CTGGTTCCTTAGCAAATCTGAGTTCC |
| 1480 | AAATGCTCCCGTGCAGAAAAC | 2133 | AGACACAAAGTGATGTGGGCAAG | 2786 | TGGTTCCTTAGCAAATCTGAGTTCCA |
| 1481 | AATGCTCCCGTGCAGAAAACA | 2134 | GACACAAAGTGATGTGGGCAAGT | 2787 | GGTTCCTTAGCAAATCTGAGTTCCAG |
| 1482 | ATGCTCCCGTGCAGAAAACAG | 2135 | ACACAAAGTGATGTGGGCAAGTG | 2788 | GTTCCTTAGCAAATCTGAGTTCCAGT |
| 1483 | TGCTCCCGTGCAGAAAACAGG | 2136 | CACAAAGTGATGTGGGCAAGTGC | 2789 | TTCCTTAGCAAATCTGAGTTCCAGTC |
| 1484 | GCTCCCGTGCAGAAAACAGGA | 2137 | ACAAAGTGATGTGGGCAAGTGCC | 2790 | TCCTTAGCAAATCTGAGTTCCAGTCC |
| 1485 | CTCCCGTGCAGAAAACAGGAA | 2138 | CAAAGTGATGTGGGCAAGTGCCA | 2791 | CCTTAGCAAATCTGAGTTCCAGTCCC |
| 1486 | TCCCGTGCAGAAAACAGGAAA | 2139 | AAAGTGATGTGGGCAAGTGCCAG | 2792 | CTTAGCAAATCTGAGTTCCAGTCCCA |
| 1487 | CCCGTGCAGAAAACAGGAAAG | 2140 | AAGTGATGTGGGCAAGTGCCAGG | 2793 | TTAGCAAATCTGAGTTCCAGTCCCAG |
| 1488 | CCGTGCAGAAAACAGGAAAGA | 2141 | AGTGATGTGGGCAAGTGCCAGGC | 2794 | TAGCAAATCTGAGTTCCAGTCCCAGG |
| 1489 | CGTGCAGAAAACAGGAAAGAA | 2142 | GTGATGTGGGCAAGTGCCAGGCC | 2795 | AGCAAATCTGAGTTCCAGTCCCAGGT |
| 1490 | GTGCAGAAAACAGGAAAGAAC | 2143 | TGATGTGGGCAAGTGCCAGGCCC | 2796 | GCAAATCTGAGTTCCAGTCCCAGGTC |
| 1491 | AGAAAACAGGAAAGAACCTGC | 2144 | GATGTGGGCAAGTGCCAGGCCCA | 2797 | CAAATCTGAGTTCCAGTCCCAGGTCC |
| 1492 | AAACAGGAAAGAACCTGCCTG | 2145 | ATGTGGGCAAGTGCCAGGCCCAC | 2798 | AAATCTGAGTTCCAGTCCCAGGTCCA |
| 1493 | AACAGGAAAGAACCTGCCTGG | 2146 | TGTGGGCAAGTGCCAGGCCCACA | 2799 | AATCTGAGTTCCAGTCCCAGGTCCAC |
| 1494 | ACAGGAAAGAACCTGCCTGGT | 2147 | GTGGGCAAGTGCCAGGCCCACAT | 2800 | ATCTGAGTTCCAGTCCCAGGTCCACT |
| 1495 | CAGGAAAGAACCTGCCTGGTT | 2148 | TGGGCAAGTGCCAGGCCCACATG | 2801 | TCTGAGTTCCAGTCCCAGGTCCACTA |
| 1496 | AGGAAAGAACCTGCCTGGTTC | 2149 | GGGCAAGTGCCAGGCCCACATGG | 2802 | CTGAGTTCCAGTCCCAGGTCCACTAC |
| 1497 | GGAAAGAACCTGCCTGGTTCC | 2150 | GGCAAGTGCCAGGCCCACATGGT | 2803 | TGAGTTCCAGTCCCAGGTCCACTACT |
| 1498 | GAAAGAACCTGCCTGGTTCCT | 2151 | GCAAGTGCCAGGCCCACATGGTA | 2804 | GAGTTCCAGTCCCAGGTCCACTACTA |
| 1499 | AAAGAACCTGCCTGGTTCCTT | 2152 | CAAGTGCCAGGCCCACATGGTAA | 2805 | AGTTCCAGTCCCAGGTCCACTACTAT |
| 1500 | AAGAACCTGCCTGGTTCCTTA | 2153 | AAGTGCCAGGCCCACATGGTAAG | 2806 | GTTCCAGTCCCAGGTCCACTACTATT |
| 1501 | AGAACCTGCCTGGTTCCTTAG | 2154 | AGTGCCAGGCCCACATGGTAAGT | 2807 | TTCCAGTCCCAGGTCCACTACTATTA |
| 1502 | GAACCTGCCTGGTTCCTTAGC | 2155 | GTGCCAGGCCCACATGGTAAGTA | 2808 | TCCAGTCCCAGGTCCACTACTATTAG |
| 1503 | AACCTGCCTGGTTCCTTAGCA | 2156 | TGCCAGGCCCACATGGTAAGTAC | 2809 | CCAGTCCCAGGTCCACTACTATTAGC |
| 1504 | ACCTGCCTGGTTCCTTAGCAA | 2157 | GCCAGGCCCACATGGTAAGTACC | 2810 | CAGTCCCAGGTCCACTACTATTAGCT |
| 1505 | CCTGCCTGGTTCCTTAGCAAA | 2158 | CCAGGCCCACATGGTAAGTACCC | 2811 | AGTCCCAGGTCCACTACTATTAGCTG |
| 1506 | CTGCCTGGTTCCTTAGCAAAT | 2159 | CAGGCCCACATGGTAAGTACCCA | 2812 | GTCCCAGGTCCACTACTATTAGCTGA |
| 1507 | TGCCTGGTTCCTTAGCAAATC | 2160 | AGGCCCACATGGTAAGTACCCAA | 2813 | TCCCAGGTCCACTACTATTAGCTGAG |
| 1508 | GCCTGGTTCCTTAGCAAATCT | 2161 | GGCCCACATGGTAAGTACCCAAC | 2814 | CCCAGGTCCACTACTATTAGCTGAGT |
| 1509 | CCTGGTTCCTTAGCAAATCTG | 2162 | GCCCACATGGTAAGTACCCAACT | 2815 | CCAGGTCCACTACTATTAGCTGAGTG |
| 1510 | CTGGTTCCTTAGCAAATCTGA | 2163 | CCCACATGGTAAGTACCCAACTA | 2816 | CAGGTCCACTACTATTAGCTGAGTGA |
| 1511 | TGGTTCCTTAGCAAATCTGAG | 2164 | CCACATGGTAAGTACCCAACTAA | 2817 | AGGTCCACTACTATTAGCTGAGTGAC |
| 1512 | GGTTCCTTAGCAAATCTGAGT | 2165 | ACATGGTAAGTACCCAACTAATC | 2818 | GGTCCACTACTATTAGCTGAGTGACG |
| 1513 | GTTCCTTAGCAAATCTGAGTT | 2166 | CATGGTAAGTACCCAACTAATCT | 2819 | GTCCACTACTATTAGCTGAGTGACGC |
| 1514 | TTCCTTAGCAAATCTGAGTTC | 2167 | ATGGTAAGTACCCAACTAATCTC | 2820 | TCCACTACTATTAGCTGAGTGACGCT |
| 1515 | TCCTTAGCAAATCTGAGTTCC | 2168 | TGGTAAGTACCCAACTAATCTCG | 2821 | CCACTACTATTAGCTGAGTGACGCTT |
| 1516 | CCTTAGCAAATCTGAGTTCCA | 2169 | GGTAAGTACCCAACTAATCTCGC | 2822 | CACTACTATTAGCTGAGTGACGCTTC |
| 1517 | CTTAGCAAATCTGAGTTCCAG | 2170 | GTAAGTACCCAACTAATCTCGCC | 2823 | ACTACTATTAGCTGAGTGACGCTTCC |
| 1518 | TTAGCAAATCTGAGTTCCAGT | 2171 | TAAGTACCCAACTAATCTCGCCC | 2824 | CTACTATTAGCTGAGTGACGCTTCCA |
| 1519 | TAGCAAATCTGAGTTCCAGTC | 2172 | AAGTACCCAACTAATCTCGCCCC | 2825 | TACTATTAGCTGAGTGACGCTTCCAG |
| 1520 | AGCAAATCTGAGTTCCAGTCC | 2173 | AGTACCCAACTAATCTCGCCCCT | 2826 | ACTATTAGCTGAGTGACGCTTCCAGC |
| 1521 | GCAAATCTGAGTTCCAGTCCC | 2174 | GTACCCAACTAATCTCGCCCCTC | 2827 | CTATTAGCTGAGTGACGCTTCCAGCC |
| 1522 | AAATCTGAGTTCCAGTCCCAG | 2175 | TACCCAACTAATCTCGCCCCTCT | 2828 | TATTAGCTGAGTGACGCTTCCAGCCC |
| 1523 | AATCTGAGTTCCAGTCCCAGG | 2176 | ACCCAACTAATCTCGCCCCTCTC | 2829 | ATTAGCTGAGTGACGCTTCCAGCCCG |
| 1524 | AGTTCCAGTCCCAGGTCCACT | 2177 | CCCAACTAATCTCGCCCCTCTCA | 2830 | TTAGCTGAGTGACGCTTCCAGCCCGT |
| 1525 | GTTCCAGTCCCAGGTCCACTA | 2178 | CCAACTAATCTCGCCCCTCTCAG | 2831 | TAGCTGAGTGACGCTTCCAGCCCGTT |
| 1526 | TTCCAGTCCCAGGTCCACTAC | 2179 | CAACTAATCTCGCCCCTCTCAGG | 2832 | AGCTGAGTGACGCTTCCAGCCCGTTT |
| 1527 | TCCAGTCCCAGGTCCACTACT | 2180 | AACTAATCTCGCCCCTCTCAGGA | 2833 | GCTGAGTGACGCTTCCAGCCCGTTTC |
| 1528 | CCAGTCCCAGGTCCACTACTA | 2181 | ACTAATCTCGCCCCTCTCAGGAC | 2834 | CTGAGTGACGCTTCCAGCCCGTTTCC |
| 1529 | CAGTCCCAGGTCCACTACTAT | 2182 | CTAATCTCGCCCCTCTCAGGACC | 2835 | TGAGTGACGCTTCCAGCCCGTTTCCC |
| 1530 | AGTCCCAGGTCCACTACTATT | 2183 | TAATCTCGCCCCTCTCAGGACCT | 2836 | GAGTGACGCTTCCAGCCCGTTTCCCC |
| 1531 | GTCCCAGGTCCACTACTATTA | 2184 | AATCTCGCCCCTCTCAGGACCTA | 2837 | AGTGACGCTTCCAGCCCGTTTCCCCC |
| 1532 | TCCCAGGTCCACTACTATTAG | 2185 | ATCTCGCCCCTCTCAGGACCTAC | 2838 | GTGACGCTTCCAGCCCGTTTCCCCCG |
| 1533 | CCCAGGTCCACTACTATTAGC | 2186 | TCTTTTAAAAATTACCTAGAAATA | 2839 | TGACGCTTCCAGCCCGTTTCCCCCGC |
| 1534 | CCAGGTCCACTACTATTAGCT | 2187 | TTTTAAAAATTACCTAGAAATAAG | 2840 | GACGCTTCCAGCCCGTTTCCCCCGCC |
| 1535 | CAGGTCCACTACTATTAGCTG | 2188 | TTTAAAAATTACCTAGAAATAAGG | 2841 | ACGCTTCCAGCCCGTTTCCCCCGCCT |
| 1536 | AGGTCCACTACTATTAGCTGA | 2189 | TTAAAAATTACCTAGAAATAAGGT | 2842 | CGCTTCCAGCCCGTTTCCCCCGCCTG |
| 1537 | GGTCCACTACTATTAGCTGAG | 2190 | TAAAAATTACCTAGAAATAAGGTT | 2843 | GCTTCCAGCCCGTTTCCCCCGCCTGG |
| 1538 | GTCCACTACTATTAGCTGAGT | 2191 | AAAAATTACCTAGAAATAAGGTTT | 2844 | CTTCCAGCCCGTTTCCCCCGCCTGGA |
| 1539 | TCCACTACTATTAGCTGAGTG | 2192 | AAAATTACCTAGAAATAAGGTTTC | 2845 | TTCCAGCCCGTTTCCCCCGCCTGGAA |
| 1540 | ACTACTATTAGCTGAGTGACG | 2193 | AAATTACCTAGAAATAAGGTTTCT | 2846 | TCCAGCCCGTTTCCCCCGCCTGGAAA |
| 1541 | CTACTATTAGCTGAGTGACGC | 2194 | AATTACCTAGAAATAAGGTTTCTT | 2847 | CCAGCCCGTTTCCCCCGCCTGGAAAC |
| 1542 | TACTATTAGCTGAGTGACGCT | 2195 | ATTACCTAGAAATAAGGTTTCTTT | 2848 | CAGCCCGTTTCCCCCGCCTGGAAACT |
| 1543 | ACTATTAGCTGAGTGACGCTT | 2196 | TTACCTAGAAATAAGGTTTCTTTA | 2849 | AGCCCGTTTCCCCCGCCTGGAAACTG |
| 1544 | CTATTAGCTGAGTGACGCTTC | 2197 | TACCTAGAAATAAGGTTTCTTTAA | 2850 | GCCCGTTTCCCCCGCCTGGAAACTGA |
| 1545 | TATTAGCTGAGTGACGCTTCC | 2198 | ACCTAGAAATAAGGTTTCTTTAAT | 2851 | CCCGTTTCCCCCGCCTGGAAACTGAG |
| 1546 | ATTAGCTGAGTGACGCTTCCA | 2199 | CCTAGAAATAAGGTTTCTTTAATT | 2852 | CCGTTTCCCCCGCCTGGAAACTGAGG |
| 1547 | TTAGCTGAGTGACGCTTCCAG | 2200 | CTAGAAATAAGGTTTCTTTAATTG | 2853 | CGTTTCCCCCGCCTGGAAACTGAGGA |
| 1548 | TAGCTGAGTGACGCTTCCAGC | 2201 | TAGAAATAAGGTTTCTTTAATTGC | 2854 | GTTTCCCCCGCCTGGAAACTGAGGAC |
| 1549 | AGCTGAGTGACGCTTCCAGCC | 2202 | AGAAATAAGGTTTCTTTAATTGCT | 2855 | TTTCCCCCGCCTGGAAACTGAGGACG |
| 1550 | GCTGAGTGACGCTTCCAGCCC | 2203 | GAAATAAGGTTTCTTTAATTGCTG | 2856 | TTCCCCCGCCTGGAAACTGAGGACGG |
| 1551 | CTGAGTGACGCTTCCAGCCCG | 2204 | AAATAAGGTTTCTTTAATTGCTGG | 2857 | TCCCCCGCCTGGAAACTGAGGACGGC |
| 1552 | TGAGTGACGCTTCCAGCCCGT | 2205 | AATAAGGTTTCTTTAATTGCTGGT | 2858 | CCCCCGCCTGGAAACTGAGGACGGCA |
| 1553 | GAGTGACGCTTCCAGCCCGTT | 2206 | ATAAGGTTTCTTTAATTGCTGGTT | 2859 | CCCCGCCTGGAAACTGAGGACGGCAA |
| 1554 | AGTGACGCTTCCAGCCCGTTT | 2207 | TAAGGTTTCTTTAATTGCTGGTTA | 2860 | CCCGCCTGGAAACTGAGGACGGCAAC |
| 1555 | GTGACGCTTCCAGCCCGTTTC | 2208 | AAGGTTTCTTTAATTGCTGGTTAA | 2861 | CCGCCTGGAAACTGAGGACGGCAACC |
| 1556 | TGACGCTTCCAGCCCGTTTCC | 2209 | AGGTTTCTTTAATTGCTGGTTAAA | 2862 | CGCCTGGAAACTGAGGACGGCAACCC |
| 1557 | GACGCTTCCAGCCCGTTTCCC | 2210 | GGTTTCTTTAATTGCTGGTTAAAA | 2863 | GCCTGGAAACTGAGGACGGCAACCCC |
| 1558 | ACGCTTCCAGCCCGTTTCCCC | 2211 | GTTTCTTTAATTGCTGGTTAAAAT | 2864 | CCTGGAAACTGAGGACGGCAACCCCC |
| 1559 | CGCTTCCAGCCCGTTTCCCCC | 2212 | TTTCTTTAATTGCTGGTTAAAATG | 2865 | CTGGAAACTGAGGACGGCAACCCCCA |
| 1560 | GCTTCCAGCCCGTTTCCCCCG | 2213 | TTCTTTAATTGCTGGTTAAAATGC | 2866 | TGGAAACTGAGGACGGCAACCCCCAC |
| 1561 | CTTCCAGCCCGTTTCCCCCGC | 2214 | TCTTTAATTGCTGGTTAAAATGCT | 2867 | GGAAACTGAGGACGGCAACCCCCACC |
| 1562 | TTCCAGCCCGTTTCCCCCGCC | 2215 | CTTTAATTGCTGGTTAAAATGCTC | 2868 | GAAACTGAGGACGGCAACCCCCACCC |
| 1563 | TCCAGCCCGTTTCCCCCGCCT | 2216 | TTTAATTGCTGGTTAAAATGCTCC | 2869 | AAACTGAGGACGGCAACCCCCACCCT |
| 1564 | CCAGCCCGTTTCCCCCGCCTG | 2217 | TTAATTGCTGGTTAAAATGCTCCC | 2870 | AACTGAGGACGGCAACCCCCACCCTC |
| 1565 | CAGCCCGTTTCCCCCGCCTGG | 2218 | TAATTGCTGGTTAAAATGCTCCCG | 2871 | ACTGAGGACGGCAACCCCCACCCTCG |
| 1566 | AGCCCGTTTCCCCCGCCTGGA | 2219 | AATTGCTGGTTAAAATGCTCCCGT | 2872 | CTGAGGACGGCAACCCCCACCCTCGC |
| 1567 | GCCCGTTTCCCCCGCCTGGAA | 2220 | ATTGCTGGTTAAAATGCTCCCGTG | 2873 | TGAGGACGGCAACCCCCACCCTCGCA |
| 1568 | CCCGTTTCCCCCGCCTGGAAA | 2221 | TTGCTGGTTAAAATGCTCCCGTGC | 2874 | GAGGACGGCAACCCCCACCCTCGCAG |
| 1569 | CCGTTTCCCCCGCCTGGAAAC | 2222 | TGCTGGTTAAAATGCTCCCGTGCA | 2875 | AGGACGGCAACCCCCACCCTCGCAGG |
| 1570 | CGTTTCCCCCGCCTGGAAACT | 2223 | GCTGGTTAAAATGCTCCCGTGCAG | 2876 | GGACGGCAACCCCCACCCTCGCAGGG |
| 1571 | GTTTCCCCCGCCTGGAAACTG | 2224 | CTGGTTAAAATGCTCCCGTGCAGA | 2877 | GACGGCAACCCCCACCCTCGCAGGGC |
| 1572 | TTTCCCCCGCCTGGAAACTGA | 2225 | TGGTTAAAATGCTCCCGTGCAGAA | 2878 | ACGGCAACCCCCACCCTCGCAGGGCC |
| 1573 | TTCCCCCGCCTGGAAACTGAG | 2226 | GGTTAAAATGCTCCCGTGCAGAAA | 2879 | CGGCAACCCCCACCCTCGCAGGGCCG |
| 1574 | TCCCCCGCCTGGAAACTGAGG | 2227 | GTTAAAATGCTCCCGTGCAGAAAA | 2880 | GGCAACCCCCACCCTCGCAGGGCCGG |
| 1575 | CCCCCGCCTGGAAACTGAGGA | 2228 | TTAAAATGCTCCCGTGCAGAAAAC | 2881 | GCAACCCCCACCCTCGCAGGGCCGGT |
| 1576 | CCCCGCCTGGAAACTGAGGAC | 2229 | TAAAATGCTCCCGTGCAGAAAACA | 2882 | CAACCCCCACCCTCGCAGGGCCGGTG |
| 1577 | CCCGCCTGGAAACTGAGGACG | 2230 | AAAATGCTCCCGTGCAGAAAACAG | 2883 | AACCCCCACCCTCGCAGGGCCGGTGG |
| 1578 | CCGCCTGGAAACTGAGGACGG | 2231 | AAATGCTCCCGTGCAGAAAACAGG | 2884 | ACCCCCACCCTCGCAGGGCCGGTGGG |
| 1579 | CGCCTGGAAACTGAGGACGGC | 2232 | AATGCTCCCGTGCAGAAAACAGGA | 2885 | CCCCCACCCTCGCAGGGCCGGTGGGA |
| 1580 | GCCTGGAAACTGAGGACGGCA | 2233 | ATGCTCCCGTGCAGAAAACAGGAA | 2886 | CCCCACCCTCGCAGGGCCGGTGGGAA |
| 1581 | CCTGGAAACTGAGGACGGCAA | 2234 | TGCTCCCGTGCAGAAAACAGGAAA | 2887 | CCCACCCTCGCAGGGCCGGTGGGAAG |
| 1582 | CTGGAAACTGAGGACGGCAAC | 2235 | GCTCCCGTGCAGAAAACAGGAAAG | 2888 | CCACCCTCGCAGGGCCGGTGGGAAGA |
| 1583 | TGGAAACTGAGGACGGCAACC | 2236 | CTCCCGTGCAGAAAACAGGAAAGA | 2889 | CACCCTCGCAGGGCCGGTGGGAAGAC |
| 1584 | GGAAACTGAGGACGGCAACCC | 2237 | TCCCGTGCAGAAAACAGGAAAGAA | 2890 | ACCCTCGCAGGGCCGGTGGGAAGACA |
| 1585 | AAACTGAGGACGGCAACCCCC | 2238 | CCCGTGCAGAAAACAGGAAAGAAC | 2891 | CCCTCGCAGGGCCGGTGGGAAGACAC |
| 1586 | AACTGAGGACGGCAACCCCCA | 2239 | CCGTGCAGAAAACAGGAAAGAACC | 2892 | CCTCGCAGGGCCGGTGGGAAGACACA |
| 1587 | ACTGAGGACGGCAACCCCCAC | 2240 | CGTGCAGAAAACAGGAAAGAACCT | 2893 | CTCGCAGGGCCGGTGGGAAGACACAA |
| 1588 | CTGAGGACGGCAACCCCCACC | 2241 | GTGCAGAAAACAGGAAAGAACCTG | 2894 | TCGCAGGGCCGGTGGGAAGACACAAA |
| 1589 | TGAGGACGGCAACCCCCACCC | 2242 | TGCAGAAAACAGGAAAGAACCTGC | 2895 | CGCAGGGCCGGTGGGAAGACACAAAG |
| 1590 | GAGGACGGCAACCCCCACCCT | 2243 | GCAGAAAACAGGAAAGAACCTGCC | 2896 | GCAGGGCCGGTGGGAAGACACAAAGT |
| 1591 | AGGACGGCAACCCCCACCCTC | 2244 | CAGAAAACAGGAAAGAACCTGCCT | 2897 | CAGGGCCGGTGGGAAGACACAAAGTG |
| 1592 | GGACGGCAACCCCCACCCTCG | 2245 | AGAAAACAGGAAAGAACCTGCCTG | 2898 | AGGGCCGGTGGGAAGACACAAAGTGA |
| 1593 | ACGGCAACCCCCACCCTCGCA | 2246 | GAAAACAGGAAAGAACCTGCCTGG | 2899 | GGGCCGGTGGGAAGACACAAAGTGAT |
| 1594 | CGGCAACCCCCACCCTCGCAG | 2247 | AAAACAGGAAAGAACCTGCCTGGT | 2900 | GGCCGGTGGGAAGACACAAAGTGATG |
| 1595 | GGCAACCCCCACCCTCGCAGG | 2248 | AAACAGGAAAGAACCTGCCTGGTT | 2901 | GCCGGTGGGAAGACACAAAGTGATGT |
| 1596 | GCAACCCCCACCCTCGCAGGG | 2249 | AACAGGAAAGAACCTGCCTGGTTC | 2902 | CCGGTGGGAAGACACAAAGTGATGTG |
| 1597 | CAACCCCCACCCTCGCAGGGC | 2250 | ACAGGAAAGAACCTGCCTGGTTCC | 2903 | CGGTGGGAAGACACAAAGTGATGTGG |
| 1598 | AACCCCCACCCTCGCAGGGCC | 2251 | CAGGAAAGAACCTGCCTGGTTCCT | 2904 | GGTGGGAAGACACAAAGTGATGTGGG |
| 1599 | ACCCCCACCCTCGCAGGGCCG | 2252 | AGGAAAGAACCTGCCTGGTTCCTT | 2905 | GTGGGAAGACACAAAGTGATGTGGGC |
| 1600 | CCCCCACCCTCGCAGGGCCGG | 2253 | GGAAAGAACCTGCCTGGTTCCTTA | 2906 | TGGGAAGACACAAAGTGATGTGGGCA |
| 1601 | CCCCACCCTCGCAGGGCCGGT | 2254 | GAAAGAACCTGCCTGGTTCCTTAG | 2907 | GGGAAGACACAAAGTGATGTGGGCAA |
| 1602 | CCCACCCTCGCAGGGCCGGTG | 2255 | AAAGAACCTGCCTGGTTCCTTAGC | 2908 | GGAAGACACAAAGTGATGTGGGCAAG |
| 1603 | CCACCCTCGCAGGGCCGGTGG | 2256 | AAGAACCTGCCTGGTTCCTTAGCA | 2909 | GAAGACACAAAGTGATGTGGGCAAGT |
| 1604 | CACCCTCGCAGGGCCGGTGGG | 2257 | AGAACCTGCCTGGTTCCTTAGCAA | 2910 | AAGACACAAAGTGATGTGGGCAAGTG |
| 1605 | ACCCTCGCAGGGCCGGTGGGA | 2258 | GAACCTGCCTGGTTCCTTAGCAAA | 2911 | AGACACAAAGTGATGTGGGCAAGTGC |
| 1606 | CCCTCGCAGGGCCGGTGGGAA | 2259 | AACCTGCCTGGTTCCTTAGCAAAT | 2912 | GACACAAAGTGATGTGGGCAAGTGCC |
| 1607 | CCTCGCAGGGCCGGTGGGAAG | 2260 | ACCTGCCTGGTTCCTTAGCAAATC | 2913 | ACACAAAGTGATGTGGGCAAGTGCCA |
| 1608 | CTCGCAGGGCCGGTGGGAAGA | 2261 | CCTGCCTGGTTCCTTAGCAAATCT | 2914 | CACAAAGTGATGTGGGCAAGTGCCAG |
| 1609 | TCGCAGGGCCGGTGGGAAGAC | 2262 | CTGCCTGGTTCCTTAGCAAATCTG | 2915 | ACAAAGTGATGTGGGCAAGTGCCAGG |
| 1610 | CGCAGGGCCGGTGGGAAGACA | 2263 | TGCCTGGTTCCTTAGCAAATCTGA | 2916 | CAAAGTGATGTGGGCAAGTGCCAGGC |
| 1611 | GCAGGGCCGGTGGGAAGACAC | 2264 | GCCTGGTTCCTTAGCAAATCTGAG | 2917 | AAAGTGATGTGGGCAAGTGCCAGGCC |
| 1612 | CAGGGCCGGTGGGAAGACACA | 2265 | CCTGGTTCCTTAGCAAATCTGAGT | 2918 | AAGTGATGTGGGCAAGTGCCAGGCCC |
| 1613 | AGGGCCGGTGGGAAGACACAA | 2266 | CTGGTTCCTTAGCAAATCTGAGTT | 2919 | AGTGATGTGGGCAAGTGCCAGGCCCA |
| 1614 | GGGCCGGTGGGAAGACACAAA | 2267 | TGGTTCCTTAGCAAATCTGAGTTC | 2920 | GTGATGTGGGCAAGTGCCAGGCCCAC |
| 1615 | GGCCGGTGGGAAGACACAAAG | 2268 | GGTTCCTTAGCAAATCTGAGTTCC | 2921 | TGATGTGGGCAAGTGCCAGGCCCACA |
| 1616 | GCCGGTGGGAAGACACAAAGT | 2269 | GTTCCTTAGCAAATCTGAGTTCCA | 2922 | GATGTGGGCAAGTGCCAGGCCCACAT |
| 1617 | CCGGTGGGAAGACACAAAGTG | 2270 | TTCCTTAGCAAATCTGAGTTCCAG | 2923 | ATGTGGGCAAGTGCCAGGCCCACATG |
| 1618 | CGGTGGGAAGACACAAAGTGA | 2271 | TCCTTAGCAAATCTGAGTTCCAGT | 2924 | TGTGGGCAAGTGCCAGGCCCACATGG |
| 1619 | GGTGGGAAGACACAAAGTGAT | 2272 | CCTTAGCAAATCTGAGTTCCAGTC | 2925 | GTGGGCAAGTGCCAGGCCCACATGGT |
| 1620 | GTGGGAAGACACAAAGTGATG | 2273 | CTTAGCAAATCTGAGTTCCAGTCC | 2926 | TGGGCAAGTGCCAGGCCCACATGGTA |
| 1621 | TGGGAAGACACAAAGTGATGT | 2274 | TTAGCAAATCTGAGTTCCAGTCCC | 2927 | GGGCAAGTGCCAGGCCCACATGGTAA |
| 1622 | GAAGACACAAAGTGATGTGGG | 2275 | TAGCAAATCTGAGTTCCAGTCCCA | 2928 | GGCAAGTGCCAGGCCCACATGGTAAG |
| 1623 | AAGACACAAAGTGATGTGGGC | 2276 | AGCAAATCTGAGTTCCAGTCCCAG | 2929 | GCAAGTGCCAGGCCCACATGGTAAGT |
| 1624 | AGACACAAAGTGATGTGGGCA | 2277 | GCAAATCTGAGTTCCAGTCCCAGG | 2930 | CAAGTGCCAGGCCCACATGGTAAGTA |
| 1625 | GACACAAAGTGATGTGGGCAA | 2278 | CAAATCTGAGTTCCAGTCCCAGGT | 2931 | AAGTGCCAGGCCCACATGGTAAGTAC |
| 1626 | ACACAAAGTGATGTGGGCAAG | 2279 | AAATCTGAGTTCCAGTCCCAGGTC | 2932 | AGTGCCAGGCCCACATGGTAAGTACC |
| 1627 | CACAAAGTGATGTGGGCAAGT | 2280 | AATCTGAGTTCCAGTCCCAGGTCC | 2933 | GTGCCAGGCCCACATGGTAAGTACCC |
| 1628 | ACAAAGTGATGTGGGCAAGTG | 2281 | ATCTGAGTTCCAGTCCCAGGTCCA | 2934 | TGCCAGGCCCACATGGTAAGTACCCA |
| 1629 | CAAAGTGATGTGGGCAAGTGC | 2282 | TCTGAGTTCCAGTCCCAGGTCCAC | 2935 | GCCAGGCCCACATGGTAAGTACCCAA |
| 1630 | AAAGTGATGTGGGCAAGTGCC | 2283 | CTGAGTTCCAGTCCCAGGTCCACT | 2936 | CCAGGCCCACATGGTAAGTACCCAAC |
| 1631 | AAGTGATGTGGGCAAGTGCCA | 2284 | TGAGTTCCAGTCCCAGGTCCACTA | 2937 | CAGGCCCACATGGTAAGTACCCAACT |
| 1632 | AGTGATGTGGGCAAGTGCCAG | 2285 | GAGTTCCAGTCCCAGGTCCACTAC | 2938 | AGGCCCACATGGTAAGTACCCAACTA |
| 1633 | GTGATGTGGGCAAGTGCCAGG | 2286 | AGTTCCAGTCCCAGGTCCACTACT | 2939 | GGCCCACATGGTAAGTACCCAACTAA |
| 1634 | TGATGTGGGCAAGTGCCAGGC | 2287 | GTTCCAGTCCCAGGTCCACTACTA | 2940 | GCCCACATGGTAAGTACCCAACTAAT |
| 1635 | GATGTGGGCAAGTGCCAGGCC | 2288 | TTCCAGTCCCAGGTCCACTACTAT | 2941 | CCCACATGGTAAGTACCCAACTAATC |
| 1636 | ATGTGGGCAAGTGCCAGGCCC | 2289 | TCCAGTCCCAGGTCCACTACTATT | 2942 | CCACATGGTAAGTACCCAACTAATCT |
| 1637 | TGTGGGCAAGTGCCAGGCCCA | 2290 | CCAGTCCCAGGTCCACTACTATTA | 2943 | CACATGGTAAGTACCCAACTAATCTC |
| 1638 | GTGGGCAAGTGCCAGGCCCAC | 2291 | CAGTCCCAGGTCCACTACTATTAG | 2944 | ACATGGTAAGTACCCAACTAATCTCG |
| 1639 | TGGGCAAGTGCCAGGCCCACA | 2292 | AGTCCCAGGTCCACTACTATTAGC | 2945 | CATGGTAAGTACCCAACTAATCTCGC |
| 1640 | GGGCAAGTGCCAGGCCCACAT | 2293 | GTCCCAGGTCCACTACTATTAGCT | 2946 | ATGGTAAGTACCCAACTAATCTCGCC |
| 1641 | GGCAAGTGCCAGGCCCACATG | 2294 | TCCCAGGTCCACTACTATTAGCTG | 2947 | TGGTAAGTACCCAACTAATCTCGCCC |
| 1642 | GCAAGTGCCAGGCCCACATGG | 2295 | CCCAGGTCCACTACTATTAGCTGA | 2948 | GGTAAGTACCCAACTAATCTCGCCCC |
| 1643 | CAAGTGCCAGGCCCACATGGT | 2296 | CCAGGTCCACTACTATTAGCTGAG | 2949 | GTAAGTACCCAACTAATCTCGCCCCT |
| 1644 | AAGTGCCAGGCCCACATGGTA | 2297 | CAGGTCCACTACTATTAGCTGAGT | 2950 | TAAGTACCCAACTAATCTCGCCCCTC |
| 1645 | AGTGCCAGGCCCACATGGTAA | 2298 | AGGTCCACTACTATTAGCTGAGTG | 2951 | AAGTACCCAACTAATCTCGCCCCTCT |
| 1646 | GTGCCAGGCCCACATGGTAAG | 2299 | GGTCCACTACTATTAGCTGAGTGA | 2952 | AGTACCCAACTAATCTCGCCCCTCTC |
| 1647 | TGCCAGGCCCACATGGTAAGT | 2300 | GTCCACTACTATTAGCTGAGTGAC | 2953 | GTACCCAACTAATCTCGCCCCTCTCA |
| 1648 | GCCAGGCCCACATGGTAAGTA | 2301 | TCCACTACTATTAGCTGAGTGACG | 2954 | TACCCAACTAATCTCGCCCCTCTCAG |
| 1649 | CCAGGCCCACATGGTAAGTAC | 2302 | CCACTACTATTAGCTGAGTGACGC | 2955 | ACCCAACTAATCTCGCCCCTCTCAGG |
| 1650 | CAGGCCCACATGGTAAGTACC | 2303 | CACTACTATTAGCTGAGTGACGCT | 2956 | CCCAACTAATCTCGCCCCTCTCAGGA |
| 1651 | AGGCCCACATGGTAAGTACCC | 2304 | ACTACTATTAGCTGAGTGACGCTT | 2957 | CCAACTAATCTCGCCCCTCTCAGGAC |
| 1652 | GGCCCACATGGTAAGTACCCA | 2305 | CTACTATTAGCTGAGTGACGCTTC | 2958 | CAACTAATCTCGCCCCTCTCAGGACC |
| 1653 | GCCCACATGGTAAGTACCCAA | 2306 | TACTATTAGCTGAGTGACGCTTCC | 2959 | AACTAATCTCGCCCCTCTCAGGACCT |
| 1654 | CCCACATGGTAAGTACCCAAC | 2307 | ACTATTAGCTGAGTGACGCTTCCA | 2960 | ACTAATCTCGCCCCTCTCAGGACCTA |
| 1655 | CCACATGGTAAGTACCCAACT | 2308 | CTATTAGCTGAGTGACGCTTCCAG | 2961 | CTAATCTCGCCCCTCTCAGGACCTAC |
| 1656 | ATGGTAAGTACCCAACTAATC | 2309 | TATTAGCTGAGTGACGCTTCCAGC | | |

TABLE 4
Exemplary SYNGAP1 ASO sequences that target RR93_v1 and/or RR93_v2

| SEQ ID | | SEQ | | SEQ | |
|---|---|---|---|---|---|
| NO | Sequence | ID NO | Sequence | ID NO | Sequence |
| 2962 | GCTCTTATTCTCCTCCTCCT | 3593 | TGGGTCTAGGGTCTCTCTGTC | 4224 | TTTTTTCCTCAAATCAGGAGTCTC |
| 2963 | TGCTGCCGTTGGCTCTTATT | 3594 | GGGTCTAGGGTCTCTCTGTCT | 4225 | TTTTTCCTCAAATCAGGAGTCTCT |
| 2964 | TGCCGCTGCTGCCGTTGGCT | 3595 | GGTCTAGGGTCTCTCTGTCTC | 4226 | TTTTCCTCAAATCAGGAGTCTCTT |
| 2965 | TCGGCTGCCGCTGCTGCCGT | 3596 | GTCTAGGGTCTCTCTGTCTCA | 4227 | TTTCCTCAAATCAGGAGTCTCTTT |
| 2966 | TCTCTCTCGGCTGCCGCTGC | 3597 | TCTAGGGTCTCTCTGTCTCAG | 4228 | TTCCTCAAATCAGGAGTCTCTTTT |
| 2967 | CCGCCCCCCCTCTCTCTCGG | 3598 | CTAGGGTCTCTCTGTCTCAGG | 4229 | TCCTCAAATCAGGAGTCTCTTTTC |
| 2968 | CGCTCCCCCGCCCCCCCTCT | 3599 | TAGGGTCTCTCTGTCTCAGGG | 4230 | CCTCAAATCAGGAGTCTCTTTTCC |
| 2969 | GCTCTCGCTCGCTCCCCCGC | 3600 | AGGGTCTCTCTGTCTCAGGGT | 4231 | CTCAAATCAGGAGTCTCTTTTCCT |
| 2970 | TCTTCGCTCTCGCTCGCTCC | 3601 | GGGTCTCTCTGTCTCAGGGTC | 4232 | TCAAATCAGGAGTCTCTTTTCCTC |
| 2971 | CTGCTCTCTTCGCTCTCGCT | 3602 | GGTCTCTCTGTCTCAGGGTCT | 4233 | CAAATCAGGAGTCTCTTTTCCTCT |
| 2972 | TGCAGAGTCTCTCCCTCCTC | 3603 | GTCTCTCTGTCTCAGGGTCTG | 4234 | AAATCAGGAGTCTCTTTTCCTCTA |
| 2973 | GGGGGCTGCAGAGTCTCTCC | 3604 | TCTCTCTGTCTCAGGGTCTGG | 4235 | AATCAGGAGTCTCTTTTCCTCTAG |
| 2974 | GGGGTGGGGGCTGCAGAGTC | 3605 | CTCTCTGTCTCAGGGTCTGGG | 4236 | ATCAGGAGTCTCTTTTCCTCTAGA |
| 2975 | GAGTAGGGGTGGGGGCTGCA | 3606 | TCTCTGTCTCAGGGTCTGGGG | 4237 | TCAGGAGTCTCTTTTCCTCTAGAT |
| 2976 | TCCCGGAGTAGGGGTGGGGG | 3607 | CTCTGTCTCAGGGTCTGGGGT | 4238 | CAGGAGTCTCTTTTCCTCTAGATT |
| 2977 | GGGCCTCCCGGAGTAGGGGT | 3608 | TCTGTCTCAGGGTCTGGGGTC | 4239 | AGGAGTCTCTTTTCCTCTAGATTT |
| 2978 | AATCTGGGCCTCCCGGAGTA | 3609 | CTGTCTCAGGGTCTGGGGTCT | 4240 | GGAGTCTCTTTTCCTCTAGATTTT |
| 2979 | CTCTCTCACAATCTGGGCCT | 3610 | TGTCTCAGGGTCTGGGGTCTG | 4241 | GAGTCTCTTTTCCTCTAGATTTTG |
| 2980 | GTGTTTTTGAGTCAGGGGTC | 3611 | GTCTCAGGGTCTGGGGTCTGC | 4242 | AGTCTCTTTTCCTCTAGATTTTGG |
| 2981 | GGGGTCTGCATCTTTAGGAC | 3612 | TCTCAGGGTCTGGGGTCTGCA | 4243 | GTCTCTTTTCCTCTAGATTTTGGC |
| 2982 | CAGGGTCTGGGGTCTGCATC | 3613 | CTCAGGGTCTGGGGTCTGCAT | 4244 | TCTCTTTTCCTCTAGATTTTGGCC |
| 2983 | TGTCTCAGGGTCTGGGGTCT | 3614 | TCAGGGTCTGGGGTCTGCATC | 4245 | CTCTTTTCCTCTAGATTTTGGCCC |
| 2984 | GGTCTCTCTGTCTCAGGGTC | 3615 | CAGGGTCTGGGGTCTGCATCT | 4246 | TCTTTTCCTCTAGATTTTGGCCCT |
| 2985 | TATCTTTCTCTGTGGGTCTA | 3616 | AGGGTCTGGGGTCTGCATCTT | 4247 | CTTTTCCTCTAGATTTTGGCCCTG |
| 2986 | TGGGGGGTGGTGAAGTATCT | 3617 | GGTCTGGGGTCTGCATCTTTA | 4248 | TTTTCCTCTAGATTTTGGCCCTGT |
| 2987 | CCACAGTGGGGGGTGGTGAA | 3618 | GTCTGGGGTCTGCATCTTTAG | 4249 | TTTCCTCTAGATTTTGGCCCTGTG |
| 2988 | ATTACCCCACAGTGGGGGGT | 3619 | TCTGGGGTCTGCATCTTTAGG | 4250 | TTCCTCTAGATTTTGGCCCTGTGT |
| 2989 | TAGATTTTGGCCCTGTGTCT | 3620 | CTGGGGTCTGCATCTTTAGGA | 4251 | TCCTCTAGATTTTGGCCCTGTGTC |
| 2990 | GGAGTCTCTTTTCCTCTAGA | 3621 | TGGGGTCTGCATCTTTAGGAC | 4252 | CCTCTAGATTTTGGCCCTGTGTCT |
| 2991 | CTCAAATCAGGAGTCTCTTT | 3622 | GGGGTCTGCATCTTTAGGACC | 4253 | CTCTAGATTTTGGCCCTGTGTCTC |
| 2992 | TTTTCCTCAAATCAGGAGTC | 3623 | GGGTCTGCATCTTTAGGACCT | 4254 | TCTAGATTTTGGCCCTGTGTCTCA |
| 2993 | GGGTCGTTTTTTCCTCAAAT | 3624 | GGTCTGCATCTTTAGGACCTC | 4255 | CTAGATTTTGGCCCTGTGTCTCAA |
| 2994 | GGATCTGGGGTCGTTTTTTC | 3625 | CTGCATCTTTAGGACCTCTGT | 4256 | TAGATTTTGGCCCTGTGTCTCAAA |
| 2995 | CTGGGGGATCTGGGGTCGTT | 3626 | TGCATCTTTAGGACCTCTGTC | 4257 | AGATTTTGGCCCTGTGTCTCAAAT |
| 2996 | TCTCTCTGGGGGATCTGGGG | 3627 | GCATCTTTAGGACCTCTGTCT | 4258 | GATTTTGGCCCTGTGTCTCAAATT |
| 2997 | GCTTCTCTCTCTGGGGGATC | 3628 | CATCTTTAGGACCTCTGTCTC | 4259 | ATTTTGGCCCTGTGTCTCAAATTA |
| 2998 | ATTTTGATATTGAGCTTCTC | 3629 | ATCTTTAGGACCTCTGTCTCT | 4260 | TTTTGGCCCTGTGTCTCAAATTAC |
| 2999 | TTCAGATTTTGATATTGAGC | 3630 | TCTTTAGGACCTCTGTCTCTC | 4261 | TTTGGCCCTGTGTCTCAAATTACC |
| 3000 | GACTGGATTTTCAGATTTTG | 3631 | CTTTAGGACCTCTGTCTCTCT | 4262 | TTGGCCCTGTGTCTCAAATTACCC |
| 3001 | CCTTTTTAGACTGGATTTTC | 3632 | TTAGGACCTCTGTCTCTCTCT | 4263 | TGGCCCTGTGTCTCAAATTACCCC |
| 3002 | AGGGTCTGGAGTCTAAGATA | 3633 | TAGGACCTCTGTCTCTCTCTG | 4264 | GGCCCTGTGTCTCAAATTACCCCA |
| 3003 | ATCTCAGGGTCTGGAGTCTA | 3634 | AGGACCTCTGTCTCTCTCTGG | 4265 | GCCCTGTGTCTCAAATTACCCCAC |
| 3004 | TCATCATCTCAGGGTCTGGA | 3635 | GGACCTCTGTCTCTCTCTGGT | 4266 | CCCTGTGTCTCAAATTACCCCACA |
| 3005 | TGAAATCATCATCTCAGGGT | 3636 | CCTCTGTCTCTCTCTGGTGTG | 4267 | CCTGTGTCTCAAATTACCCCACAG |
| 3006 | TGGTCCCTGAAATCATCATC | 3637 | TCTGTCTCTCTCTGGTGTGTT | 4268 | CTGTGTCTCAAATTACCCCACAGT |
| 3007 | GGTCCTGGTCCCTGAAATCA | 3638 | CTGTCTCTCTCTGGTGTGTTT | 4269 | TGTGTCTCAAATTACCCCACAGTG |
| 3008 | AGGTCTCAGGTCCTGGTCCC | 3639 | GGGTCTGGAGTCTAAGATATCT | 4270 | GTGTCTCAAATTACCCCACAGTGG |
| 3009 | AGTCTAGGTCTCAGGTCCTG | 3640 | GGTCTGGAGTCTAAGATATCTG | 4271 | TGTCTCAAATTACCCCACAGTGGG |
| 3010 | TTCTGAGTCTAGGTCTCAGG | 3641 | GTCTGGAGTCTAAGATATCTGT | 4272 | GTCTCAAATTACCCCACAGTGGGG |
| 3011 | CATCTTTTTCTGAGTCTAGG | 3642 | TCTGGAGTCTAAGATATCTGTA | 4273 | TCTCAAATTACCCCACAGTGGGGG |
| 3012 | GGGCCTCATCTTTTTCTGAG | 3643 | CTGGAGTCTAAGATATCTGTAG | 4274 | CTCAAATTACCCCACAGTGGGGGG |
| 3013 | TCTGAATCTGGGCCTCATCT | 3644 | TGGAGTCTAAGATATCTGTAGG | 4275 | TCAAATTACCCCACAGTGGGGGGT |
| 3014 | GCTCTTTCTGAATCTGGGCC | 3645 | GGAGTCTAAGATATCTGTAGGT | 4276 | CAAATTACCCCACAGTGGGGGGTG |
| 3015 | CATCTGGCTCTTTCTGAATC | 3646 | GAGTCTAAGATATCTGTAGGTA | 4277 | AAATTACCCCACAGTGGGGGGTGG |
| 3016 | TCTAATTCTACATCTGGCTC | 3647 | AGTCTAAGATATCTGTAGGTAT | 4278 | AATTACCCCACAGTGGGGGGTGGT |
| 3017 | CTCTAAGCTCTAATTCTACA | 3648 | GTCTAAGATATCTGTAGGTATG | 4279 | ATTACCCCACAGTGGGGGGTGGTG |
| 3018 | GAGTTCTCTAAGCTCTAATT | 3649 | TCTAAGATATCTGTAGGTATGG | 4280 | TTACCCCACAGTGGGGGGTGGTGA |
| 3019 | TAGGTCTGAGTTCTCTAAGC | 3650 | CTAAGATATCTGTAGGTATGGA | 4281 | TACCCCACAGTGGGGGGTGGTGAA |
| 3020 | GGGGTCTCTTTCTAGGTCTG | 3651 | TAAGATATCTGTAGGTATGGAG | 4282 | ACCCCACAGTGGGGGGTGGTGAAG |
| 3021 | AGTCTGGGGTCTCTTTCTAG | 3652 | AAGATATCTGTAGGTATGGAGA | 4283 | CCCCACAGTGGGGGGTGGTGAAGT |
| 3022 | ATCTGAGTCTGGGGTCTCTT | 3653 | AGATATCTGTAGGTATGGAGAA | 4284 | CCCACAGTGGGGGGTGGTGAAGTA |
| 3023 | TCTGAGATCTGAGTCTGGGG | 3654 | GATATCTGTAGGTATGGAGAAC | 4285 | CCACAGTGGGGGGTGGTGAAGTAT |
| 3024 | CTAAGTTATCAGTCTCTGAG | 3655 | ATATCTGTAGGTATGGAGAACC | 4286 | CACAGTGGGGGGTGGTGAAGTATC |
| 3025 | CTGTCTCTAAGTTATCAGTC | 3656 | TATCTGTAGGTATGGAGAACCC | 4287 | ACAGTGGGGGGTGGTGAAGTATCT |
| 3026 | GTGTCTCTGTCTCTAAGTTA | 3657 | ATCTGTAGGTATGGAGAACCCT | 4288 | CAGTGGGGGGTGGTGAAGTATCTT |
| 3027 | CAGGAGTGTCTCTGTCTCTA | 3658 | TCTGTAGGTATGGAGAACCCTT | 4289 | AGTGGGGGGTGGTGAAGTATCTTT |
| 3028 | CCCCTTAAGTCAGGAGTGTC | 3659 | CTGTAGGTATGGAGAACCCTTT | 4290 | GTGGGGGGTGGTGAAGTATCTTTC |
| 3029 | TCTATCTCCCCTTAAGTCAG | 3660 | TGTAGGTATGGAGAACCCTTTT | 4291 | TGGGGGGTGGTGAAGTATCTTTCT |
| 3030 | GAAGTCTCTATCTCCCCTTA | 3661 | GTAGGTATGGAGAACCCTTTTT | 4292 | GGGGGGTGGTGAAGTATCTTTCTC |
| 3031 | CAGCTGAAGTCTCTATCTCC | 3662 | TAGGTATGGAGAACCCTTTTTA | 4293 | GGGGGTGGTGAAGTATCTTTCTCT |
| 3032 | CGGACCAGCTGAAGTCTCTA | 3663 | AGGTATGGAGAACCCTTTTTAG | 4294 | GGGGTGGTGAAGTATCTTTCTCTG |
| 3033 | CCATCTCCGGACCAGCTGAA | 3664 | GGTATGGAGAACCCTTTTTAGA | 4295 | GGGTGGTGAAGTATCTTTCTCTGT |
| 3034 | GAGTTGTCCATCTCCGGACC | 3665 | GTATGGAGAACCCTTTTTAGAC | 4296 | GGTGGTGAAGTATCTTTCTCTGTG |
| 3035 | TTTGGGTCTCTGAGTTGTCC | 3666 | TATGGAGAACCCTTTTTAGACT | 4297 | GTGGTGAAGTATCTTTCTCTGTGG |
| 3036 | ATGAATTTTGGGTCTCTGAG | 3667 | ATGGAGAACCCTTTTTAGACTG | 4298 | TGGTGAAGTATCTTTCTCTGTGGG |
| 3037 | TTCTTCATGAATTTTGGGTC | 3668 | TGGAGAACCCTTTTTAGACTGG | 4299 | GGTGAAGTATCTTTCTCTGTGGGT |
| 3038 | TCGAAGTCTTCTTCATGAAT | 3669 | GGAGAACCCTTTTTAGACTGGA | 4300 | GTGAAGTATCTTTCTCTGTGGGTC |
| 3039 | GTCTTTCGAAGTCTTCTTCA | 3670 | GAGAACCCTTTTTAGACTGGAT | 4301 | TGAAGTATCTTTCTCTGTGGGTCT |
| 3040 | TCTGAGGTCTTTCGAAGTCT | 3671 | AGAACCCTTTTTAGACTGGATT | 4302 | GAAGTATCTTTCTCTGTGGGTCTA |
| 3041 | TCGCACTCTGAGGTCTTTCG | 3672 | GAACCCTTTTTAGACTGGATTT | 4303 | AAGTATCTTTCTCTGTGGGTCTAG |
| 3042 | CTGTGGTCGCACTCTGAGGT | 3673 | AACCCTTTTTAGACTGGATTTT | 4304 | AGTATCTTTCTCTGTGGGTCTAGG |
| 3043 | CAGGGTCTGTGGTCGCACTC | 3674 | ACCCTTTTTAGACTGGATTTTC | 4305 | GTATCTTTCTCTGTGGGTCTAGGG |
| 3044 | TGTTTCAGGGTCTGTGGTCG | 3675 | CCCTTTTTAGACTGGATTTTCA | 4306 | TATCTTTCTCTGTGGGTCTAGGGT |
| 3045 | TTTCTATGTTTCAGGGTCTG | 3676 | CCTTTTTAGACTGGATTTTCAG | 4307 | ATCTTTCTCTGTGGGTCTAGGGTC |
| 3046 | GGGGGTTTCTATGTTTCAGG | 3677 | CTTTTTAGACTGGATTTTCAGA | 4308 | TCTTTCTCTGTGGGTCTAGGGTCT |
| 3047 | CTGGTTTGGGGGGTTTCTAT | 3678 | TTTTTAGACTGGATTTTCAGAT | 4309 | CTTTCTCTGTGGGTCTAGGGTCTC |
| 3048 | TATGCTTCTGGTTTGGGGGG | 3679 | TTTTAGACTGGATTTTCAGATT | 4310 | TTTCTCTGTGGGTCTAGGGTCTCT |
| 3049 | GTTTCCTTTTATGCTTCTGG | 3680 | TTTAGACTGGATTTTCAGATTT | 4311 | TTCTCTGTGGGTCTAGGGTCTCTC |
| 3050 | GATTGAGTTTCCTTTTATGC | 3681 | TTAGACTGGATTTTCAGATTTT | 4312 | TCTCTGTGGGTCTAGGGTCTCTCT |
| 3051 | TCTTAGGATTGAGTTTCCTT | 3682 | TAGACTGGATTTTCAGATTTTG | 4313 | CTCTGTGGGTCTAGGGTCTCTCTG |
| 3052 | GATCTTTCTTAGGATTGAGT | 3683 | AGACTGGATTTTCAGATTTTGA | 4314 | TCTGTGGGTCTAGGGTCTCTCTGT |
| 3053 | GTGGAGATCTTTCTTAGGAT | 3684 | GACTGGATTTTCAGATTTTGAT | 4315 | CTGTGGGTCTAGGGTCTCTCTGTC |
| 3054 | TTTGTGTGGAGATCTTTCTT | 3685 | ACTGGATTTTCAGATTTTGATA | 4316 | TGTGGGTCTAGGGTCTCTCTGTCT |
| 3055 | TCAGTATTTGTGTGGAGATC | 3686 | CTGGATTTTCAGATTTTGATAT | 4317 | GTGGGTCTAGGGTCTCTCTGTCTC |
| 3056 | GTCTTTCAGTATTTGTGTGG | 3687 | TGGATTTTCAGATTTTGATATT | 4318 | TGGGTCTAGGGTCTCTCTGTCTCA |
| 3057 | CGGAGGGGTCTTTCAGTATT | 3688 | GGATTTTCAGATTTTGATATTG | 4319 | GGGTCTAGGGTCTCTCTGTCTCAG |
| 3058 | GATTTCGGAGGGGTCTTTCA | 3689 | GATTTTCAGATTTTGATATTGA | 4320 | GGTCTAGGGTCTCTCTGTCTCAGG |
| 3059 | GAGACAGATTTCGGAGGGGT | 3690 | ATTTTCAGATTTTGATATTGAG | 4321 | GTCTAGGGTCTCTCTGTCTCAGGG |
| 3060 | TCTCTGAGACAGATTTCGGA | 3691 | TTTTCAGATTTTGATATTGAGC | 4322 | TCTAGGGTCTCTCTGTCTCAGGGT |
| 3061 | TTGGAGTTTGTCTCTGAGAC | 3692 | TTTCAGATTTTGATATTGAGCT | 4323 | CTAGGGTCTCTCTGTCTCAGGGTC |
| 3062 | TTGAGTTTGGAGTTTGTCTC | 3693 | TTCAGATTTTGATATTGAGCTT | 4324 | TAGGGTCTCTCTGTCTCAGGGTCT |
| 3063 | CTGTCTTTGAGTTTGGAGTT | 3694 | TCAGATTTTGATATTGAGCTTC | 4325 | AGGGTCTCTCTGTCTCAGGGTCTG |
| 3064 | GAGATCTCTGTCTTTGAGTT | 3695 | CAGATTTTGATATTGAGCTTCT | 4326 | GGGTCTCTCTGTCTCAGGGTCTGG |
| 3065 | GTTCCCTGAGATCTCTGTCT | 3696 | AGATTTTGATATTGAGCTTCTC | 4327 | GGTCTCTCTGTCTCAGGGTCTGGG |
| 3066 | GGGAGGTTCCCTGAGATCTC | 3697 | GATTTTGATATTGAGCTTCTCT | 4328 | GTCTCTCTGTCTCAGGGTCTGGGG |
| 3067 | GGGAGGGGAGGTTCCCTGAG | 3698 | ATTTTGATATTGAGCTTCTCTC | 4329 | TCTCTCTGTCTCAGGGTCTGGGGT |
| 3068 | AAGTGGGGAGGGGAGGTTCC | 3699 | TTTTGATATTGAGCTTCTCTCT | 4330 | CTCTCTGTCTCAGGGTCTGGGGTC |
| 3069 | GGTTCTAGGGCAGGGAAGTG | 3700 | TTTGATATTGAGCTTCTCTCTC | 4331 | TCTCTGTCTCAGGGTCTGGGGTCT |
| 3070 | TCTCGGAGGTTCTAGGGCAG | 3701 | TTGATATTGAGCTTCTCTCTCT | 4332 | CTCTGTCTCAGGGTCTGGGGTCTG |
| 3071 | GTTATACCTCTCGGAGGTTC | 3702 | TGATATTGAGCTTCTCTCTCTG | 4333 | TCTGTCTCAGGGTCTGGGGTCTGC |
| 3072 | GTCAGGGTTATACCTCTCGG | 3703 | GATATTGAGCTTCTCTCTCTGG | 4334 | CTGTCTCAGGGTCTGGGGTCTGCA |
| 3073 | GGCTGACGTCAGGGTTATAC | 3704 | ATATTGAGCTTCTCTCTCTGGG | 4335 | TGTCTCAGGGTCTGGGGTCTGCAT |
| 3074 | TCCCAGGCTGACGTCAGGGT | 3705 | TATTGAGCTTCTCTCTCTGGGG | 4336 | GTCTCAGGGTCTGGGGTCTGCATC |
| 3075 | TCGGAGTTTCCCAGGCTGAC | 3706 | ATTGAGCTTCTCTCTCTGGGGG | 4337 | TCTCAGGGTCTGGGGTCTGCATCT |
| 3076 | GATGCCTCGGAGTTTCCCAG | 3707 | TTGAGCTTCTCTCTCTGGGGGA | 4338 | CTCAGGGTCTGGGGTCTGCATCTT |
| 3077 | GGTGGGGATGCCTCGGAGTT | 3708 | TGAGCTTCTCTCTCTGGGGGAT | 4339 | TCAGGGTCTGGGGTCTGCATCTTT |
| 3078 | CTGGTGGTGGGGATGCCTCG | 3709 | GAGCTTCTCTCTCTGGGGGATC | 4340 | CAGGGTCTGGGGTCTGCATCTTTA |
| 3079 | ATTGGTCTGGTGGTGGGGAT | 3710 | AGCTTCTCTCTCTGGGGGATCT | 4341 | AGGGTCTGGGGTCTGCATCTTTAG |
| 3080 | GAGGTCATTGGTCTGGTGGT | 3711 | GCTTCTCTCTCTGGGGGATCTG | 4342 | GGGTCTGGGGTCTGCATCTTTAGG |
| 3081 | AGGTCTGAGGTCATTGGTCT | 3712 | CTTCTCTCTCTGGGGGATCTGG | 4343 | GGTCTGGGGTCTGCATCTTTAGGA |
| 3082 | CCTTCAAGGTCTGAGGTCAT | 3713 | TTCTCTCTCTGGGGGATCTGGG | 4344 | GTCTGGGGTCTGCATCTTTAGGAC |
| 3083 | TCCCCTCCCTTCAAGGTCTG | 3714 | TCTCTCTCTGGGGGATCTGGGG | 4345 | TCTGGGGTCTGCATCTTTAGGACC |
| 3084 | GGTCTGGAGTCTAAGATA | 3715 | CTCTCTCTGGGGGATCTGGGGT | 4346 | CTGGGGTCTGCATCTTTAGGACCT |
| 3085 | AGTCTAAGATATCTGTAG | 3716 | TCTCTCTGGGGGATCTGGGGTC | 4347 | TGGGGTCTGCATCTTTAGGACCTC |
| 3086 | GTCTAAGATATCTGTAGG | 3717 | CTCTCTGGGGGATCTGGGGTCG | 4348 | GGGGTCTGCATCTTTAGGACCTCT |
| 3087 | AAGATATCTGTAGGTATG | 3718 | TCTCTGGGGGATCTGGGGTCGT | 4349 | GGGTCTGCATCTTTAGGACCTCTG |
| 3088 | ATATCTGTAGGTATGGAG | 3719 | CTCTGGGGGATCTGGGGTCGTT | 4350 | GGTCTGCATCTTTAGGACCTCTGT |
| 3089 | TGTAGGTATGGAGAACCC | 3720 | TCTGGGGGATCTGGGGTCGTTT | 4351 | GTCTGCATCTTTAGGACCTCTGTC |
| 3090 | GTATGGAGAACCCTTTTT | 3721 | CTGGGGGATCTGGGGTCGTTTT | 4352 | TCTGCATCTTTAGGACCTCTGTCT |
| 3091 | GGGGGATCTGGGGTCGTT | 3722 | TGGGGGATCTGGGGTCGTTTTT | 4353 | CTGCATCTTTAGGACCTCTGTCTC |
| 3092 | GGGGATCTGGGGTCGTTT | 3723 | GGGGGATCTGGGGTCGTTTTTT | 4354 | TGCATCTTTAGGACCTCTGTCTCT |
| 3093 | GGGATCTGGGGTCGTTTT | 3724 | GGGGATCTGGGGTCGTTTTTTC | 4355 | GCATCTTTAGGACCTCTGTCTCTC |
| 3094 | GGATCTGGGGTCGTTTTT | 3725 | GGGATCTGGGGTCGTTTTTTCC | 4356 | CATCTTTAGGACCTCTGTCTCTCT |
| 3095 | GATCTGGGGTCGTTTTTT | 3726 | GGATCTGGGGTCGTTTTTTCCT | 4357 | ATCTTTAGGACCTCTGTCTCTCTC |
| 3096 | ATCTGGGGTCGTTTTTTC | 3727 | GATCTGGGGTCGTTTTTTCCTC | 4358 | TCTTTAGGACCTCTGTCTCTCTCT |
| 3097 | GGTCGTTTTTTCCTCAAA | 3728 | ATCTGGGGTCGTTTTTTCCTCA | 4359 | CTTTAGGACCTCTGTCTCTCTCTG |
| 3098 | TCGTTTTTTCCTCAAATC | 3729 | TCTGGGGTCGTTTTTTCCTCAA | 4360 | TTTAGGACCTCTGTCTCTCTCTGG |
| 3099 | TTTCCTCAAATCAGGAGT | 3730 | CTGGGGTCGTTTTTTCCTCAAA | 4361 | TTAGGACCTCTGTCTCTCTCTGGT |
| 3100 | CCTCTAGATTTTGGCCCT | 3731 | TGGGGTCGTTTTTTCCTCAAAT | 4362 | TAGGACCTCTGTCTCTCTCTGGTG |
| 3101 | TAGATTTTGGCCCTGTGT | 3732 | GGGGTCGTTTTTTCCTCAAATC | 4363 | AGGACCTCTGTCTCTCTCTGGTGT |
| 3102 | AGATTTTGGCCCTGTGTC | 3733 | GGGTCGTTTTTTCCTCAAATCA | 4364 | GGACCTCTGTCTCTCTCTGGTGTG |
| 3103 | CCTGTGTCTCAAATTACC | 3734 | GGTCGTTTTTTCCTCAAATCAG | 4365 | GACCTCTGTCTCTCTCTGGTGTGT |
| 3104 | GTGTCTCAAATTACCCCA | 3735 | GTCGTTTTTTCCTCAAATCAGG | 4366 | ACCTCTGTCTCTCTCTGGTGTGTT |
| 3105 | GTCTCAAATTACCCCACA | 3736 | TCGTTTTTTCCTCAAATCAGGA | 4367 | CCTCTGTCTCTCTCTGGTGTGTTT |
| 3106 | AAATTACCCCACAGTGGG | 3737 | CGTTTTTTCCTCAAATCAGGAG | 4368 | GGGTCTGGAGTCTAAGATATCTGTA |
| 3107 | TACCCCACAGTGGGGGGT | 3738 | GTTTTTTCCTCAAATCAGGAGT | 4369 | GGTCTGGAGTCTAAGATATCTGTAG |
| 3108 | GGGGGGTGGTGAAGTATC | 3739 | TTTTTTCCTCAAATCAGGAGTC | 4370 | GTCTGGAGTCTAAGATATCTGTAGG |
| 3109 | GGGGGTGGTGAAGTATCT | 3740 | TTTTTCCTCAAATCAGGAGTCT | 4371 | TCTGGAGTCTAAGATATCTGTAGGT |
| 3110 | GGGGTGGTGAAGTATCTT | 3741 | TTTTCCTCAAATCAGGAGTCTC | 4372 | CTGGAGTCTAAGATATCTGTAGGTA |
| 3111 | GGGTGGTGAAGTATCTTT | 3742 | TTTCCTCAAATCAGGAGTCTCT | 4373 | TGGAGTCTAAGATATCTGTAGGTAT |
| 3112 | GGTGGTGAAGTATCTTTC | 3743 | TTCCTCAAATCAGGAGTCTCTT | 4374 | GGAGTCTAAGATATCTGTAGGTATG |
| 3113 | GGTGAAGTATCTTTCTCT | 3744 | TCCTCAAATCAGGAGTCTCTTT | 4375 | GAGTCTAAGATATCTGTAGGTATGG |
| 3114 | TCTGTGGGTCTAGGGTCT | 3745 | CCTCAAATCAGGAGTCTCTTTT | 4376 | AGTCTAAGATATCTGTAGGTATGGA |
| 3115 | CTGTGGGTCTAGGGTCTC | 3746 | CTCAAATCAGGAGTCTCTTTTC | 4377 | GTCTAAGATATCTGTAGGTATGGAG |
| 3116 | TGTGGGTCTAGGGTCTCT | 3747 | TCAAATCAGGAGTCTCTTTTCC | 4378 | TCTAAGATATCTGTAGGTATGGAGA |
| 3117 | GTCTAGGGTCTCTCTGTC | 3748 | CAAATCAGGAGTCTCTTTTCCT | 4379 | CTAAGATATCTGTAGGTATGGAGAA |
| 3118 | TCTAGGGTCTCTCTGTCT | 3749 | ATCAGGAGTCTCTTTTCCTCTA | 4380 | TAAGATATCTGTAGGTATGGAGAAC |
| 3119 | GGGTCTGCATCTTTAGGA | 3750 | TCAGGAGTCTCTTTTCCTCTAG | 4381 | AAGATATCTGTAGGTATGGAGAACC |
| 3120 | GGTCTGCATCTTTAGGAC | 3751 | CAGGAGTCTCTTTTCCTCTAGA | 4382 | AGATATCTGTAGGTATGGAGAACCC |
| 3121 | GGGTCTGGAGTCTAAGATA | 3752 | AGGAGTCTCTTTTCCTCTAGAT | 4383 | GATATCTGTAGGTATGGAGAACCCT |
| 3122 | GGTCTGGAGTCTAAGATAT | 3753 | GGAGTCTCTTTTCCTCTAGATT | 4384 | ATATCTGTAGGTATGGAGAACCCTT |
| 3123 | GTCTGGAGTCTAAGATATC | 3754 | GAGTCTCTTTTCCTCTAGATTT | 4385 | TATCTGTAGGTATGGAGAACCCTTT |
| 3124 | GAGTCTAAGATATCTGTAG | 3755 | AGTCTCTTTTCCTCTAGATTTT | 4386 | ATCTGTAGGTATGGAGAACCCTTTT |
| 3125 | AGTCTAAGATATCTGTAGG | 3756 | TCTCTTTTCCTCTAGATTTTGG | 4387 | TCTGTAGGTATGGAGAACCCTTTTT |
| 3126 | GTCTAAGATATCTGTAGGT | 3757 | CTCTTTTCCTCTAGATTTTGGC | 4388 | CTGTAGGTATGGAGAACCCTTTTTA |
| 3127 | TCTAAGATATCTGTAGGTA | 3758 | TCTTTTCCTCTAGATTTTGGCC | 4389 | TGTAGGTATGGAGAACCCTTTTTAG |
| 3128 | TAAGATATCTGTAGGTATG | 3759 | CTTTTCCTCTAGATTTTGGCCC | 4390 | GTAGGTATGGAGAACCCTTTTTAGA |
| 3129 | AAGATATCTGTAGGTATGG | 3760 | TTTTCCTCTAGATTTTGGCCCT | 4391 | TAGGTATGGAGAACCCTTTTTAGAC |
| 3130 | GATATCTGTAGGTATGGAG | 3761 | TTTCCTCTAGATTTTGGCCCTG | 4392 | AGGTATGGAGAACCCTTTTTAGACT |
| 3131 | ATATCTGTAGGTATGGAGA | 3762 | TTCCTCTAGATTTTGGCCCTGT | 4393 | GGTATGGAGAACCCTTTTTAGACTG |
| 3132 | CTGTAGGTATGGAGAACCC | 3763 | TCCTCTAGATTTTGGCCCTGTG | 4394 | GTATGGAGAACCCTTTTTAGACTGG |
| 3133 | TGTAGGTATGGAGAACCCT | 3764 | CCTCTAGATTTTGGCCCTGTGT | 4395 | TATGGAGAACCCTTTTTAGACTGGA |
| 3134 | GGTATGGAGAACCCTTTTT | 3765 | CTCTAGATTTTGGCCCTGTGTC | 4396 | ATGGAGAACCCTTTTTAGACTGGAT |
| 3135 | GTATGGAGAACCCTTTTTA | 3766 | TCTAGATTTTGGCCCTGTGTCT | 4397 | TGGAGAACCCTTTTTAGACTGGATT |
| 3136 | TGGAGAACCCTTTTTAGAC | 3767 | CTAGATTTTGGCCCTGTGTCTC | 4398 | GGAGAACCCTTTTTAGACTGGATTT |
| 3137 | GAGAACCCTTTTTAGACTG | 3768 | TAGATTTTGGCCCTGTGTCTCA | 4399 | GAGAACCCTTTTTAGACTGGATTTT |
| 3138 | AGAACCCTTTTTAGACTGG | 3769 | AGATTTTGGCCCTGTGTCTCAA | 4400 | AGAACCCTTTTTAGACTGGATTTTC |
| 3139 | GAACCCTTTTTAGACTGGA | 3770 | GATTTTGGCCCTGTGTCTCAAA | 4401 | GAACCCTTTTTAGACTGGATTTTCA |
| 3140 | AACCCTTTTTAGACTGGAT | 3771 | ATTTTGGCCCTGTGTCTCAAAT | 4402 | AACCCTTTTTAGACTGGATTTTCAG |
| 3141 | CCCTTTTTAGACTGGATTT | 3772 | TTTTGGCCCTGTGTCTCAAATT | 4403 | ACCCTTTTTAGACTGGATTTTCAGA |
| 3142 | TTTTTAGACTGGATTTTCA | 3773 | TTTGGCCCTGTGTCTCAAATTA | 4404 | CCCTTTTTAGACTGGATTTTCAGAT |
| 3143 | TTAGACTGGATTTTCAGAT | 3774 | TTGGCCCTGTGTCTCAAATTAC | 4405 | CCTTTTTAGACTGGATTTTCAGATT |
| 3144 | TAGACTGGATTTTCAGATT | 3775 | TGGCCCTGTGTCTCAAATTACC | 4406 | CTTTTTAGACTGGATTTTCAGATTT |
| 3145 | GACTGGATTTTCAGATTTT | 3776 | GGCCCTGTGTCTCAAATTACCC | 4407 | TTTTTAGACTGGATTTTCAGATTTT |
| 3146 | ACTGGATTTTCAGATTTTG | 3777 | GCCCTGTGTCTCAAATTACCCC | 4408 | TTTTAGACTGGATTTTCAGATTTTG |
| 3147 | TCAGATTTTGATATTGAGC | 3778 | CCCTGTGTCTCAAATTACCCCA | 4409 | TTTAGACTGGATTTTCAGATTTTGA |
| 3148 | GATTTTGATATTGAGCTTC | 3779 | CCTGTGTCTCAAATTACCCCAC | 4410 | TTAGACTGGATTTTCAGATTTTGAT |
| 3149 | TTTTGATATTGAGCTTCTC | 3780 | CTGTGTCTCAAATTACCCCACA | 4411 | TAGACTGGATTTTCAGATTTTGATA |
| 3150 | TTGATATTGAGCTTCTCTC | 3781 | TGTGTCTCAAATTACCCCACAG | 4412 | AGACTGGATTTTCAGATTTTGATAT |
| 3151 | TGATATTGAGCTTCTCTCT | 3782 | GTGTCTCAAATTACCCCACAGT | 4413 | GACTGGATTTTCAGATTTTGATATT |
| 3152 | GATATTGAGCTTCTCTCTC | 3783 | TGTCTCAAATTACCCCACAGTG | 4414 | ACTGGATTTTCAGATTTTGATATTG |
| 3153 | AGCTTCTCTCTCTGGGGGA | 3784 | GTCTCAAATTACCCCACAGTGG | 4415 | CTGGATTTTCAGATTTTGATATTGA |
| 3154 | CTTCTCTCTCTGGGGGATC | 3785 | TCTCAAATTACCCCACAGTGGG | 4416 | TGGATTTTCAGATTTTGATATTGAG |
| 3155 | CTCTCTCTGGGGGATCTGG | 3786 | CTCAAATTACCCCACAGTGGGG | 4417 | GGATTTTCAGATTTTGATATTGAGC |
| 3156 | TCTCTCTGGGGGATCTGGG | 3787 | TCAAATTACCCCACAGTGGGGG | 4418 | GATTTTCAGATTTTGATATTGAGCT |
| 3157 | CTGGGGGATCTGGGGTCGT | 3788 | CAAATTACCCCACAGTGGGGGG | 4419 | ATTTTCAGATTTTGATATTGAGCTT |
| 3158 | TGGGGGATCTGGGGTCGTT | 3789 | AAATTACCCCACAGTGGGGGGT | 4420 | TTTTCAGATTTTGATATTGAGCTTC |
| 3159 | GGGGGATCTGGGGTCGTTT | 3790 | AATTACCCCACAGTGGGGGGTG | 4421 | TTTCAGATTTTGATATTGAGCTTCT |
| 3160 | GGGGATCTGGGGTCGTTTT | 3791 | ATTACCCCACAGTGGGGGGTGG | 4422 | TTCAGATTTTGATATTGAGCTTCTC |
| 3161 | GGGATCTGGGGTCGTTTTT | 3792 | TTACCCCACAGTGGGGGGTGGT | 4423 | TCAGATTTTGATATTGAGCTTCTCT |
| 3162 | GGATCTGGGGTCGTTTTTT | 3793 | TACCCCACAGTGGGGGGTGGTG | 4424 | CAGATTTTGATATTGAGCTTCTCTC |
| 3163 | GATCTGGGGTCGTTTTTTC | 3794 | ACCCCACAGTGGGGGGTGGTGA | 4425 | AGATTTTGATATTGAGCTTCTCTCT |
| 3164 | ATCTGGGGTCGTTTTTTCC | 3795 | CCCCACAGTGGGGGGTGGTGAA | 4426 | GATTTTGATATTGAGCTTCTCTCTC |
| 3165 | TCTGGGGTCGTTTTTTCCT | 3796 | CCCACAGTGGGGGGTGGTGAAG | 4427 | ATTTTGATATTGAGCTTCTCTCTCT |
| 3166 | GGGTCGTTTTTTCCTCAAA | 3797 | CCACAGTGGGGGGTGGTGAAGT | 4428 | TTTTGATATTGAGCTTCTCTCTCTG |
| 3167 | GGTCGTTTTTTCCTCAAAT | 3798 | CACAGTGGGGGGTGGTGAAGTA | 4429 | TTTGATATTGAGCTTCTCTCTCTGG |
| 3168 | GTCGTTTTTTCCTCAAATC | 3799 | ACAGTGGGGGGTGGTGAAGTAT | 4430 | TTGATATTGAGCTTCTCTCTCTGGG |
| 3169 | TCGTTTTTTCCTCAAATCA | 3800 | CAGTGGGGGGTGGTGAAGTATC | 4431 | TGATATTGAGCTTCTCTCTCTGGGG |
| 3170 | CGTTTTTTCCTCAAATCAG | 3801 | AGTGGGGGGTGGTGAAGTATCT | 4432 | GATATTGAGCTTCTCTCTCTGGGGG |
| 3171 | TTTTCCTCAAATCAGGAGT | 3802 | GTGGGGGGTGGTGAAGTATCTT | 4433 | ATATTGAGCTTCTCTCTCTGGGGGA |
| 3172 | TTTCCTCAAATCAGGAGTC | 3803 | TGGGGGGTGGTGAAGTATCTTT | 4434 | TATTGAGCTTCTCTCTCTGGGGGAT |
| 3173 | CTCAAATCAGGAGTCTCTT | 3804 | GGGGGGTGGTGAAGTATCTTTC | 4435 | ATTGAGCTTCTCTCTCTGGGGGATC |
| 3174 | GAGTCTCTTTTCCTCTAGA | 3805 | GGGGGTGGTGAAGTATCTTTCT | 4436 | TTGAGCTTCTCTCTCTGGGGGATCT |
| 3175 | TTTTCCTCTAGATTTTGGC | 3806 | GGGGTGGTGAAGTATCTTTCTC | 4437 | TGAGCTTCTCTCTCTGGGGGATCTG |
| 3176 | TCCTCTAGATTTTGGCCCT | 3807 | GGGTGGTGAAGTATCTTTCTCT | 4438 | GAGCTTCTCTCTCTGGGGGATCTGG |
| 3177 | CCTCTAGATTTTGGCCCTG | 3808 | GGTGGTGAAGTATCTTTCTCTG | 4439 | AGCTTCTCTCTCTGGGGGATCTGGG |
| 3178 | CTCTAGATTTTGGCCCTGT | 3809 | GTGGTGAAGTATCTTTCTCTGT | 4440 | GCTTCTCTCTCTGGGGGATCTGGGG |
| 3179 | TCTAGATTTTGGCCCTGTG | 3810 | TGGTGAAGTATCTTTCTCTGTG | 4441 | CTTCTCTCTCTGGGGGATCTGGGGT |
| 3180 | CTAGATTTTGGCCCTGTGT | 3811 | GGTGAAGTATCTTTCTCTGTGG | 4442 | TTCTCTCTCTGGGGGATCTGGGGTC |
| 3181 | TAGATTTTGGCCCTGTGTC | 3812 | GTGAAGTATCTTTCTCTGTGGG | 4443 | TCTCTCTCTGGGGGATCTGGGGTCG |
| 3182 | AGATTTTGGCCCTGTGTCT | 3813 | TGAAGTATCTTTCTCTGTGGGT | 4444 | CTCTCTCTGGGGGATCTGGGGTCGT |
| 3183 | GATTTTGGCCCTGTGTCTC | 3814 | GAAGTATCTTTCTCTGTGGGTC | 4445 | TCTCTCTGGGGGATCTGGGGTCGTT |
| 3184 | ATTTTGGCCCTGTGTCTCA | 3815 | AAGTATCTTTCTCTGTGGGTCT | 4446 | CTCTCTGGGGGATCTGGGGTCGTTT |
| 3185 | TTTGGCCCTGTGTCTCAAA | 3816 | AGTATCTTTCTCTGTGGGTCTA | 4447 | TCTCTGGGGGATCTGGGGTCGTTTT |
| 3186 | TTGGCCCTGTGTCTCAAAT | 3817 | GTATCTTTCTCTGTGGGTCTAG | 4448 | CTCTGGGGGATCTGGGGTCGTTTTT |
| 3187 | GCCCTGTGTCTCAAATTAC | 3818 | TATCTTTCTCTGTGGGTCTAGG | 4449 | TCTGGGGGATCTGGGGTCGTTTTTT |
| 3188 | CCCTGTGTCTCAAATTACC | 3819 | ATCTTTCTCTGTGGGTCTAGGG | 4450 | CTGGGGGATCTGGGGTCGTTTTTTC |
| 3189 | CCTGTGTCTCAAATTACCC | 3820 | TCTTTCTCTGTGGGTCTAGGGT | 4451 | TGGGGGATCTGGGGTCGTTTTTTCC |
| 3190 | TGTGTCTCAAATTACCCCA | 3821 | CTTTCTCTGTGGGTCTAGGGTC | 4452 | GGGGGATCTGGGGTCGTTTTTTCCT |
| 3191 | GTGTCTCAAATTACCCCAC | 3822 | TTTCTCTGTGGGTCTAGGGTCT | 4453 | GGGGATCTGGGGTCGTTTTTTCCTC |
| 3192 | TGTCTCAAATTACCCCACA | 3823 | TTCTCTGTGGGTCTAGGGTCTC | 4454 | GGGATCTGGGGTCGTTTTTTCCTCA |
| 3193 | GTCTCAAATTACCCCACAG | 3824 | TCTCTGTGGGTCTAGGGTCTCT | 4455 | GGATCTGGGGTCGTTTTTTCCTCAA |
| 3194 | TCTCAAATTACCCCACAGT | 3825 | CTCTGTGGGTCTAGGGTCTCTC | 4456 | GATCTGGGGTCGTTTTTTCCTCAAA |
| 3195 | TCAAATTACCCCACAGTGG | 3826 | TCTGTGGGTCTAGGGTCTCTCT | 4457 | ATCTGGGGTCGTTTTTTCCTCAAAT |
| 3196 | CAAATTACCCCACAGTGGG | 3827 | CTGTGGGTCTAGGGTCTCTCTG | 4458 | TCTGGGGTCGTTTTTTCCTCAAATC |
| 3197 | AAATTACCCCACAGTGGGG | 3828 | TGTGGGTCTAGGGTCTCTCTGT | 4459 | CTGGGGTCGTTTTTTCCTCAAATCA |
| 3198 | ATTACCCCACAGTGGGGGG | 3829 | GTGGGTCTAGGGTCTCTCTGTC | 4460 | TGGGGTCGTTTTTTCCTCAAATCAG |
| 3199 | TTACCCCACAGTGGGGGGT | 3830 | TGGGTCTAGGGTCTCTCTGTCT | 4461 | GGGGTCGTTTTTTCCTCAAATCAGG |
| 3200 | TACCCCACAGTGGGGGGTG | 3831 | GGGTCTAGGGTCTCTCTGTCTC | 4462 | GGGTCGTTTTTTCCTCAAATCAGGA |
| 3201 | ACCCCACAGTGGGGGGTGG | 3832 | GGTCTAGGGTCTCTCTGTCTCA | 4463 | GGTCGTTTTTTCCTCAAATCAGGAG |
| 3202 | CCCCACAGTGGGGGGTGGT | 3833 | GTCTAGGGTCTCTCTGTCTCAG | 4464 | GTCGTTTTTTCCTCAAATCAGGAGT |
| 3203 | CCCACAGTGGGGGGTGGTG | 3834 | TCTAGGGTCTCTCTGTCTCAGG | 4465 | TCGTTTTTTCCTCAAATCAGGAGTC |
| 3204 | CACAGTGGGGGGTGGTGAA | 3835 | CTAGGGTCTCTCTGTCTCAGGG | 4466 | CGTTTTTTCCTCAAATCAGGAGTCT |
| 3205 | GTGGGGGGTGGTGAAGTAT | 3836 | TAGGGTCTCTCTGTCTCAGGGT | 4467 | GTTTTTTCCTCAAATCAGGAGTCTC |
| 3206 | TGGGGGGTGGTGAAGTATC | 3837 | AGGGTCTCTCTGTCTCAGGGTC | 4468 | TTTTTTCCTCAAATCAGGAGTCTCT |
| 3207 | GGGGGGTGGTGAAGTATCT | 3838 | GGGTCTCTCTGTCTCAGGGTCT | 4469 | TTTTTCCTCAAATCAGGAGTCTCTT |
| 3208 | GGGGGTGGTGAAGTATCTT | 3839 | GGTCTCTCTGTCTCAGGGTCTG | 4470 | TTTTCCTCAAATCAGGAGTCTCTTT |
| 3209 | GGGGTGGTGAAGTATCTTT | 3840 | GTCTCTCTGTCTCAGGGTCTGG | 4471 | TTTCCTCAAATCAGGAGTCTCTTTT |
| 3210 | GGGTGGTGAAGTATCTTTC | 3841 | TCTCTCTGTCTCAGGGTCTGGG | 4472 | TTCCTCAAATCAGGAGTCTCTTTTC |
| 3211 | GGTGGTGAAGTATCTTTCT | 3842 | CTCTCTGTCTCAGGGTCTGGGG | 4473 | TCCTCAAATCAGGAGTCTCTTTTCC |
| 3212 | TGGTGAAGTATCTTTCTCT | 3843 | TCTCTGTCTCAGGGTCTGGGGT | 4474 | CCTCAAATCAGGAGTCTCTTTTCCT |
| 3213 | GGTGAAGTATCTTTCTCTG | 3844 | CTCTGTCTCAGGGTCTGGGGTC | 4475 | CTCAAATCAGGAGTCTCTTTTCCTC |
| 3214 | CTTTCTCTGTGGGTCTAGG | 3845 | TCTGTCTCAGGGTCTGGGGTCT | 4476 | TCAAATCAGGAGTCTCTTTTCCTCT |
| 3215 | CTCTGTGGGTCTAGGGTCT | 3846 | CTGTCTCAGGGTCTGGGGTCTG | 4477 | CAAATCAGGAGTCTCTTTTCCTCTA |
| 3216 | TCTGTGGGTCTAGGGTCTC | 3847 | TGTCTCAGGGTCTGGGGTCTGC | 4478 | AAATCAGGAGTCTCTTTTCCTCTAG |
| 3217 | CTGTGGGTCTAGGGTCTCT | 3848 | GTCTCAGGGTCTGGGGTCTGCA | 4479 | AATCAGGAGTCTCTTTTCCTCTAGA |
| 3218 | TGTGGGTCTAGGGTCTCTC | 3849 | TCTCAGGGTCTGGGGTCTGCAT | 4480 | ATCAGGAGTCTCTTTTCCTCTAGAT |
| 3219 | GGGTCTAGGGTCTCTCTGT | 3850 | CTCAGGGTCTGGGGTCTGCATC | 4481 | TCAGGAGTCTCTTTTCCTCTAGATT |
| 3220 | GGTCTAGGGTCTCTCTGTC | 3851 | TCAGGGTCTGGGGTCTGCATCT | 4482 | CAGGAGTCTCTTTTCCTCTAGATTT |
| 3221 | GTCTAGGGTCTCTCTGTCT | 3852 | CAGGGTCTGGGGTCTGCATCTT | 4483 | AGGAGTCTCTTTTCCTCTAGATTTT |
| 3222 | TCTAGGGTCTCTCTGTCTC | 3853 | AGGGTCTGGGGTCTGCATCTTT | 4484 | GGAGTCTCTTTTCCTCTAGATTTTG |
| 3223 | CTAGGGTCTCTCTGTCTCA | 3854 | GGGTCTGGGGTCTGCATCTTTA | 4485 | GAGTCTCTTTTCCTCTAGATTTTGG |
| 3224 | GTCTCTCTGTCTCAGGGTC | 3855 | GGTCTGGGGTCTGCATCTTTAG | 4486 | AGTCTCTTTTCCTCTAGATTTTGGC |
| 3225 | CTGTCTCAGGGTCTGGGGT | 3856 | GTCTGGGGTCTGCATCTTTAGG | 4487 | GTCTCTTTTCCTCTAGATTTTGGCC |
| 3226 | TGTCTCAGGGTCTGGGGTC | 3857 | TCTGGGGTCTGCATCTTTAGGA | 4488 | TCTCTTTTCCTCTAGATTTTGGCCC |
| 3227 | TCAGGGTCTGGGGTCTGCA | 3858 | CTGGGGTCTGCATCTTTAGGAC | 4489 | CTCTTTTCCTCTAGATTTTGGCCCT |
| 3228 | TCTGGGGTCTGCATCTTTA | 3859 | TGGGGTCTGCATCTTTAGGACC | 4490 | TCTTTTCCTCTAGATTTTGGCCCTG |
| 3229 | CTGGGGTCTGCATCTTTAG | 3860 | GGGGTCTGCATCTTTAGGACCT | 4491 | CTTTTCCTCTAGATTTTGGCCCTGT |
| 3230 | GGGGTCTGCATCTTTAGGA | 3861 | GGGTCTGCATCTTTAGGACCTC | 4492 | TTTTCCTCTAGATTTTGGCCCTGTG |
| 3231 | GGGTCTGCATCTTTAGGAC | 3862 | GGTCTGCATCTTTAGGACCTCT | 4493 | TTTCCTCTAGATTTTGGCCCTGTGT |
| 3232 | GGTCTGCATCTTTAGGACC | 3863 | TCTGCATCTTTAGGACCTCTGT | 4494 | TTCCTCTAGATTTTGGCCCTGTGTC |
| 3233 | ATCTTTAGGACCTCTGTCT | 3864 | CTGCATCTTTAGGACCTCTGTC | 4495 | TCCTCTAGATTTTGGCCCTGTGTCT |
| 3234 | GGGTCTGGAGTCTAAGATAT | 3865 | TGCATCTTTAGGACCTCTGTCT | 4496 | CCTCTAGATTTTGGCCCTGTGTCTC |
| 3235 | GGTCTGGAGTCTAAGATATC | 3866 | GCATCTTTAGGACCTCTGTCTC | 4497 | CTCTAGATTTTGGCCCTGTGTCTCA |
| 3236 | GTCTGGAGTCTAAGATATCT | 3867 | CATCTTTAGGACCTCTGTCTCT | 4498 | TCTAGATTTTGGCCCTGTGTCTCAA |
| 3237 | TCTGGAGTCTAAGATATCTG | 3868 | ATCTTTAGGACCTCTGTCTCTC | 4499 | CTAGATTTTGGCCCTGTGTCTCAAA |
| 3238 | CTGGAGTCTAAGATATCTGT | 3869 | TCTTTAGGACCTCTGTCTCTCT | 4500 | TAGATTTTGGCCCTGTGTCTCAAAT |
| 3239 | TGGAGTCTAAGATATCTGTA | 3870 | CTTTAGGACCTCTGTCTCTCTC | 4501 | AGATTTTGGCCCTGTGTCTCAAATT |
| 3240 | GGAGTCTAAGATATCTGTAG | 3871 | TTTAGGACCTCTGTCTCTCTCT | 4502 | GATTTTGGCCCTGTGTCTCAAATTA |
| 3241 | GAGTCTAAGATATCTGTAGG | 3872 | TTAGGACCTCTGTCTCTCTCTG | 4503 | ATTTTGGCCCTGTGTCTCAAATTAC |
| 3242 | AGTCTAAGATATCTGTAGGT | 3873 | TAGGACCTCTGTCTCTCTCTGG | 4504 | TTTTGGCCCTGTGTCTCAAATTACC |
| 3243 | GTCTAAGATATCTGTAGGTA | 3874 | AGGACCTCTGTCTCTCTCTGGT | 4505 | TTTGGCCCTGTGTCTCAAATTACCC |
| 3244 | TCTAAGATATCTGTAGGTAT | 3875 | GGACCTCTGTCTCTCTCTGGTG | 4506 | TTGGCCCTGTGTCTCAAATTACCCC |
| 3245 | CTAAGATATCTGTAGGTATG | 3876 | ACCTCTGTCTCTCTCTGGTGTG | 4507 | TGGCCCTGTGTCTCAAATTACCCCA |
| 3246 | TAAGATATCTGTAGGTATGG | 3877 | CCTCTGTCTCTCTCTGGTGTGT | 4508 | GGCCCTGTGTCTCAAATTACCCCAC |
| 3247 | AAGATATCTGTAGGTATGGA | 3878 | CTCTGTCTCTCTCTGGTGTGTT | 4509 | GCCCTGTGTCTCAAATTACCCCACA |
| 3248 | AGATATCTGTAGGTATGGAG | 3879 | TCTGTCTCTCTCTGGTGTGTTT | 4510 | CCCTGTGTCTCAAATTACCCCACAG |
| 3249 | GATATCTGTAGGTATGGAGA | 3880 | GGGTCTGGAGTCTAAGATATCTG | 4511 | CCTGTGTCTCAAATTACCCCACAGT |
| 3250 | ATATCTGTAGGTATGGAGAA | 3881 | GGTCTGGAGTCTAAGATATCTGT | 4512 | CTGTGTCTCAAATTACCCCACAGTG |
| 3251 | TCTGTAGGTATGGAGAACCC | 3882 | GTCTGGAGTCTAAGATATCTGTA | 4513 | TGTGTCTCAAATTACCCCACAGTGG |
| 3252 | CTGTAGGTATGGAGAACCCT | 3883 | TCTGGAGTCTAAGATATCTGTAG | 4514 | GTGTCTCAAATTACCCCACAGTGGG |
| 3253 | TGTAGGTATGGAGAACCCTT | 3884 | CTGGAGTCTAAGATATCTGTAGG | 4515 | TGTCTCAAATTACCCCACAGTGGGG |
| 3254 | GTAGGTATGGAGAACCCTTT | 3885 | TGGAGTCTAAGATATCTGTAGGT | 4516 | GTCTCAAATTACCCCACAGTGGGGG |
| 3255 | AGGTATGGAGAACCCTTTTT | 3886 | GGAGTCTAAGATATCTGTAGGTA | 4517 | TCTCAAATTACCCCACAGTGGGGGG |
| 3256 | GGTATGGAGAACCCTTTTTA | 3887 | GAGTCTAAGATATCTGTAGGTAT | 4518 | CTCAAATTACCCCACAGTGGGGGGT |
| 3257 | GTATGGAGAACCCTTTTTAG | 3888 | AGTCTAAGATATCTGTAGGTATG | 4519 | TCAAATTACCCCACAGTGGGGGGTG |
| 3258 | TATGGAGAACCCTTTTTAGA | 3889 | GTCTAAGATATCTGTAGGTATGG | 4520 | CAAATTACCCCACAGTGGGGGGTGG |
| 3259 | ATGGAGAACCCTTTTTAGAC | 3890 | TCTAAGATATCTGTAGGTATGGA | 4521 | AAATTACCCCACAGTGGGGGGTGGT |
| 3260 | TGGAGAACCCTTTTTAGACT | 3891 | CTAAGATATCTGTAGGTATGGAG | 4522 | AATTACCCCACAGTGGGGGGTGGTG |
| 3261 | GGAGAACCCTTTTTAGACTG | 3892 | TAAGATATCTGTAGGTATGGAGA | 4523 | ATTACCCCACAGTGGGGGGTGGTGA |
| 3262 | GAGAACCCTTTTTAGACTGG | 3893 | AAGATATCTGTAGGTATGGAGAA | 4524 | TTACCCCACAGTGGGGGGTGGTGAA |
| 3263 | AGAACCCTTTTTAGACTGGA | 3894 | AGATATCTGTAGGTATGGAGAAC | 4525 | TACCCCACAGTGGGGGGTGGTGAAG |
| 3264 | GAACCCTTTTTAGACTGGAT | 3895 | GATATCTGTAGGTATGGAGAACC | 4526 | ACCCCACAGTGGGGGGTGGTGAAGT |
| 3265 | AACCCTTTTTAGACTGGATT | 3896 | ATATCTGTAGGTATGGAGAACCC | 4527 | CCCCACAGTGGGGGGTGGTGAAGTA |
| 3266 | ACCCTTTTTAGACTGGATTT | 3897 | TATCTGTAGGTATGGAGAACCCT | 4528 | CCCACAGTGGGGGGTGGTGAAGTAT |
| 3267 | CCCTTTTTAGACTGGATTTT | 3898 | ATCTGTAGGTATGGAGAACCCTT | 4529 | CCACAGTGGGGGGTGGTGAAGTATC |
| 3268 | CTTTTTAGACTGGATTTTCA | 3899 | TCTGTAGGTATGGAGAACCCTTT | 4530 | CACAGTGGGGGGTGGTGAAGTATCT |
| 3269 | TTTTTAGACTGGATTTTCAG | 3900 | CTGTAGGTATGGAGAACCCTTTT | 4531 | ACAGTGGGGGGTGGTGAAGTATCTT |
| 3270 | TTTAGACTGGATTTTCAGAT | 3901 | TGTAGGTATGGAGAACCCTTTTT | 4532 | CAGTGGGGGGTGGTGAAGTATCTTT |
| 3271 | TTAGACTGGATTTTCAGATT | 3902 | GTAGGTATGGAGAACCCTTTTTA | 4533 | AGTGGGGGGTGGTGAAGTATCTTTC |
| 3272 | TAGACTGGATTTTCAGATTT | 3903 | TAGGTATGGAGAACCCTTTTTAG | 4534 | GTGGGGGGTGGTGAAGTATCTTTCT |
| 3273 | AGACTGGATTTTCAGATTTT | 3904 | AGGTATGGAGAACCCTTTTTAGA | 4535 | TGGGGGGTGGTGAAGTATCTTTCTC |
| 3274 | ACTGGATTTTCAGATTTTGA | 3905 | GGTATGGAGAACCCTTTTTAGAC | 4536 | GGGGGGTGGTGAAGTATCTTTCTCT |
| 3275 | CTGGATTTTCAGATTTTGAT | 3906 | GTATGGAGAACCCTTTTTAGACT | 4537 | GGGGGTGGTGAAGTATCTTTCTCTG |
| 3276 | TTTTCAGATTTTGATATTGA | 3907 | TATGGAGAACCCTTTTTAGACTG | 4538 | GGGGTGGTGAAGTATCTTTCTCTGT |
| 3277 | TTTCAGATTTTGATATTGAG | 3908 | ATGGAGAACCCTTTTTAGACTGG | 4539 | GGGTGGTGAAGTATCTTTCTCTGTG |
| 3278 | TCAGATTTTGATATTGAGCT | 3909 | TGGAGAACCCTTTTTAGACTGGA | 4540 | GGTGGTGAAGTATCTTTCTCTGTGG |
| 3279 | AGATTTTGATATTGAGCTTC | 3910 | GGAGAACCCTTTTTAGACTGGAT | 4541 | GTGGTGAAGTATCTTTCTCTGTGGG |
| 3280 | GATTTTGATATTGAGCTTCT | 3911 | GAGAACCCTTTTTAGACTGGATT | 4542 | TGGTGAAGTATCTTTCTCTGTGGGT |
| 3281 | TTTTGATATTGAGCTTCTCT | 3912 | AGAACCCTTTTTAGACTGGATTT | 4543 | GGTGAAGTATCTTTCTCTGTGGGTC |
| 3282 | TTTGATATTGAGCTTCTCTC | 3913 | GAACCCTTTTTAGACTGGATTTT | 4544 | GTGAAGTATCTTTCTCTGTGGGTCT |
| 3283 | TTGATATTGAGCTTCTCTCT | 3914 | AACCCTTTTTAGACTGGATTTTC | 4545 | TGAAGTATCTTTCTCTGTGGGTCTA |
| 3284 | TGATATTGAGCTTCTCTCTC | 3915 | ACCCTTTTTAGACTGGATTTTCA | 4546 | GAAGTATCTTTCTCTGTGGGTCTAG |
| 3285 | GATATTGAGCTTCTCTCTCT | 3916 | CCCTTTTTAGACTGGATTTTCAG | 4547 | AAGTATCTTTCTCTGTGGGTCTAGG |
| 3286 | TTGAGCTTCTCTCTCTGGGG | 3917 | CCTTTTTAGACTGGATTTTCAGA | 4548 | AGTATCTTTCTCTGTGGGTCTAGGG |
| 3287 | TGAGCTTCTCTCTCTGGGGG | 3918 | CTTTTTAGACTGGATTTTCAGAT | 4549 | GTATCTTTCTCTGTGGGTCTAGGGT |
| 3288 | GAGCTTCTCTCTCTGGGGGA | 3919 | TTTTTAGACTGGATTTTCAGATT | 4550 | TATCTTTCTCTGTGGGTCTAGGGTC |
| 3289 | AGCTTCTCTCTCTGGGGGAT | 3920 | TTTTAGACTGGATTTTCAGATTT | 4551 | ATCTTTCTCTGTGGGTCTAGGGTCT |
| 3290 | CTTCTCTCTCTGGGGGATCT | 3921 | TTTAGACTGGATTTTCAGATTTT | 4552 | TCTTTCTCTGTGGGTCTAGGGTCTC |
| 3291 | TTCTCTCTCTGGGGGATCTG | 3922 | TTAGACTGGATTTTCAGATTTTG | 4553 | CTTTCTCTGTGGGTCTAGGGTCTCT |
| 3292 | TCTCTCTCTGGGGGATCTGG | 3923 | TAGACTGGATTTTCAGATTTTGA | 4554 | TTTCTCTGTGGGTCTAGGGTCTCTC |
| 3293 | CTCTCTCTGGGGGATCTGGG | 3924 | AGACTGGATTTTCAGATTTTGAT | 4555 | TTCTCTGTGGGTCTAGGGTCTCTCT |
| 3294 | CTCTCTGGGGGATCTGGGGT | 3925 | GACTGGATTTTCAGATTTTGATA | 4556 | TCTCTGTGGGTCTAGGGTCTCTCTG |
| 3295 | TCTCTGGGGGATCTGGGGTC | 3926 | ACTGGATTTTCAGATTTTGATAT | 4557 | CTCTGTGGGTCTAGGGTCTCTCTGT |
| 3296 | CTCTGGGGGATCTGGGGTCG | 3927 | CTGGATTTTCAGATTTTGATATT | 4558 | TCTGTGGGTCTAGGGTCTCTCTGTC |
| 3297 | TCTGGGGGATCTGGGGTCGT | 3928 | TGGATTTTCAGATTTTGATATTG | 4559 | CTGTGGGTCTAGGGTCTCTCTGTCT |
| 3298 | TGGGGGATCTGGGGTCGTTT | 3929 | GGATTTTCAGATTTTGATATTGA | 4560 | TGTGGGTCTAGGGTCTCTCTGTCTC |
| 3299 | GGGGGATCTGGGGTCGTTTT | 3930 | GATTTTCAGATTTTGATATTGAG | 4561 | GTGGGTCTAGGGTCTCTCTGTCTCA |
| 3300 | GGGGATCTGGGGTCGTTTTT | 3931 | ATTTTCAGATTTTGATATTGAGC | 4562 | TGGGTCTAGGGTCTCTCTGTCTCAG |
| 3301 | GGGATCTGGGGTCGTTTTTT | 3932 | TTTTCAGATTTTGATATTGAGCT | 4563 | GGGTCTAGGGTCTCTCTGTCTCAGG |
| 3302 | GATCTGGGGTCGTTTTTTCC | 3933 | TTTCAGATTTTGATATTGAGCTT | 4564 | GGTCTAGGGTCTCTCTGTCTCAGGG |
| 3303 | ATCTGGGGTCGTTTTTTCCT | 3934 | TTCAGATTTTGATATTGAGCTTC | 4565 | GTCTAGGGTCTCTCTGTCTCAGGGT |
| 3304 | TCTGGGGTCGTTTTTTCCTC | 3935 | TCAGATTTTGATATTGAGCTTCT | 4566 | TCTAGGGTCTCTCTGTCTCAGGGTC |
| 3305 | GGGGTCGTTTTTTCCTCAAA | 3936 | CAGATTTTGATATTGAGCTTCTC | 4567 | CTAGGGTCTCTCTGTCTCAGGGTCT |
| 3306 | GGTCGTTTTTTCCTCAAATC | 3937 | AGATTTTGATATTGAGCTTCTCT | 4568 | TAGGGTCTCTCTGTCTCAGGGTCTG |
| 3307 | GTCGTTTTTTCCTCAAATCA | 3938 | GATTTTGATATTGAGCTTCTCTC | 4569 | AGGGTCTCTCTGTCTCAGGGTCTGG |
| 3308 | TCGTTTTTTCCTCAAATCAG | 3939 | ATTTTGATATTGAGCTTCTCTCT | 4570 | GGGTCTCTCTGTCTCAGGGTCTGGG |
| 3309 | CGTTTTTTCCTCAAATCAGG | 3940 | TTTTGATATTGAGCTTCTCTCTC | 4571 | GGTCTCTCTGTCTCAGGGTCTGGGG |
| 3310 | TTTTTCCTCAAATCAGGAGT | 3941 | TTTGATATTGAGCTTCTCTCTCT | 4572 | GTCTCTCTGTCTCAGGGTCTGGGGT |
| 3311 | TTTCCTCAAATCAGGAGTCT | 3942 | TTGATATTGAGCTTCTCTCTCTG | 4573 | TCTCTCTGTCTCAGGGTCTGGGGTC |
| 3312 | TCCTCAAATCAGGAGTCTCT | 3943 | TGATATTGAGCTTCTCTCTCTGG | 4574 | CTCTCTGTCTCAGGGTCTGGGGTCT |
| 3313 | CCTCAAATCAGGAGTCTCTT | 3944 | GATATTGAGCTTCTCTCTCTGGG | 4575 | TCTCTGTCTCAGGGTCTGGGGTCTG |
| 3314 | TCAAATCAGGAGTCTCTTTT | 3945 | ATATTGAGCTTCTCTCTCTGGGG | 4576 | CTCTGTCTCAGGGTCTGGGGTCTGC |
| 3315 | CAAATCAGGAGTCTCTTTTC | 3946 | TATTGAGCTTCTCTCTCTGGGGG | 4577 | TCTGTCTCAGGGTCTGGGGTCTGCA |
| 3316 | CAGGAGTCTCTTTTCCTCTA | 3947 | ATTGAGCTTCTCTCTCTGGGGGA | 4578 | CTGTCTCAGGGTCTGGGGTCTGCAT |
| 3317 | GAGTCTCTTTTCCTCTAGAT | 3948 | TTGAGCTTCTCTCTCTGGGGGAT | 4579 | TGTCTCAGGGTCTGGGGTCTGCATC |
| 3318 | AGTCTCTTTTCCTCTAGATT | 3949 | TGAGCTTCTCTCTCTGGGGGATC | 4580 | GTCTCAGGGTCTGGGGTCTGCATCT |
| 3319 | CTTTTCCTCTAGATTTTGGC | 3950 | GAGCTTCTCTCTCTGGGGGATCT | 4581 | TCTCAGGGTCTGGGGTCTGCATCTT |
| 3320 | TTTTCCTCTAGATTTTGGCC | 3951 | AGCTTCTCTCTCTGGGGGATCTG | 4582 | CTCAGGGTCTGGGGTCTGCATCTTT |
| 3321 | TTCCTCTAGATTTTGGCCCT | 3952 | GCTTCTCTCTCTGGGGGATCTGG | 4583 | TCAGGGTCTGGGGTCTGCATCTTTA |
| 3322 | TCCTCTAGATTTTGGCCCTG | 3953 | CTTCTCTCTCTGGGGGATCTGGG | 4584 | CAGGGTCTGGGGTCTGCATCTTTAG |
| 3323 | CCTCTAGATTTTGGCCCTGT | 3954 | TTCTCTCTCTGGGGGATCTGGGG | 4585 | AGGGTCTGGGGTCTGCATCTTTAGG |
| 3324 | CTCTAGATTTTGGCCCTGTG | 3955 | TCTCTCTCTGGGGGATCTGGGGT | 4586 | GGGTCTGGGGTCTGCATCTTTAGGA |
| 3325 | TCTAGATTTTGGCCCTGTGT | 3956 | CTCTCTCTGGGGGATCTGGGGTC | 4587 | GGTCTGGGGTCTGCATCTTTAGGAC |
| 3326 | CTAGATTTTGGCCCTGTGTC | 3957 | TCTCTCTGGGGGATCTGGGGTCG | 4588 | GTCTGGGGTCTGCATCTTTAGGACC |
| 3327 | AGATTTTGGCCCTGTGTCTC | 3958 | CTCTCTGGGGGATCTGGGGTCGT | 4589 | TCTGGGGTCTGCATCTTTAGGACCT |
| 3328 | GATTTTGGCCCTGTGTCTCA | 3959 | TCTCTGGGGGATCTGGGGTCGTT | 4590 | CTGGGGTCTGCATCTTTAGGACCTC |
| 3329 | ATTTTGGCCCTGTGTCTCAA | 3960 | CTCTGGGGGATCTGGGGTCGTTT | 4591 | TGGGGTCTGCATCTTTAGGACCTCT |
| 3330 | TTTTGGCCCTGTGTCTCAAA | 3961 | TCTGGGGGATCTGGGGTCGTTTT | 4592 | GGGGTCTGCATCTTTAGGACCTCTG |
| 3331 | TTTGGCCCTGTGTCTCAAAT | 3962 | CTGGGGGATCTGGGGTCGTTTTT | 4593 | GGGTCTGCATCTTTAGGACCTCTGT |
| 3332 | TTGGCCCTGTGTCTCAAATT | 3963 | TGGGGGATCTGGGGTCGTTTTTT | 4594 | GGTCTGCATCTTTAGGACCTCTGTC |
| 3333 | GGCCCTGTGTCTCAAATTAC | 3964 | GGGGGATCTGGGGTCGTTTTTTC | 4595 | GTCTGCATCTTTAGGACCTCTGTCT |
| 3334 | GCCCTGTGTCTCAAATTACC | 3965 | GGGGATCTGGGGTCGTTTTTTCC | 4596 | TCTGCATCTTTAGGACCTCTGTCTC |
| 3335 | CCCTGTGTCTCAAATTACCC | 3966 | GGGATCTGGGGTCGTTTTTTCCT | 4597 | CTGCATCTTTAGGACCTCTGTCTCT |
| 3336 | CCTGTGTCTCAAATTACCCC | 3967 | GGATCTGGGGTCGTTTTTTCCTC | 4598 | TGCATCTTTAGGACCTCTGTCTCTC |
| 3337 | CTGTGTCTCAAATTACCCCA | 3968 | GATCTGGGGTCGTTTTTTCCTCA | 4599 | GCATCTTTAGGACCTCTGTCTCTCT |
| 3338 | TGTGTCTCAAATTACCCCAC | 3969 | ATCTGGGGTCGTTTTTTCCTCAA | 4600 | CATCTTTAGGACCTCTGTCTCTCTC |
| 3339 | GTGTCTCAAATTACCCCACA | 3970 | TCTGGGGTCGTTTTTTCCTCAAA | 4601 | ATCTTTAGGACCTCTGTCTCTCTCT |
| 3340 | TGTCTCAAATTACCCCACAG | 3971 | CTGGGGTCGTTTTTTCCTCAAAT | 4602 | TCTTTAGGACCTCTGTCTCTCTCTG |
| 3341 | GTCTCAAATTACCCCACAGT | 3972 | TGGGGTCGTTTTTTCCTCAAATC | 4603 | CTTTAGGACCTCTGTCTCTCTCTGG |
| 3342 | TCTCAAATTACCCCACAGTG | 3973 | GGGGTCGTTTTTTCCTCAAATCA | 4604 | TTTAGGACCTCTGTCTCTCTCTGGT |
| 3343 | CTCAAATTACCCCACAGTGG | 3974 | GGGTCGTTTTTTCCTCAAATCAG | 4605 | TTAGGACCTCTGTCTCTCTCTGGTG |
| 3344 | TCAAATTACCCCACAGTGGG | 3975 | GGTCGTTTTTTCCTCAAATCAGG | 4606 | TAGGACCTCTGTCTCTCTCTGGTGT |
| 3345 | CAAATTACCCCACAGTGGGG | 3976 | GTCGTTTTTTCCTCAAATCAGGA | 4607 | AGGACCTCTGTCTCTCTCTGGTGTG |
| 3346 | AAATTACCCCACAGTGGGGG | 3977 | TCGTTTTTTCCTCAAATCAGGAG | 4608 | GGACCTCTGTCTCTCTCTGGTGTGT |
| 3347 | AATTACCCCACAGTGGGGGG | 3978 | CGTTTTTTCCTCAAATCAGGAGT | 4609 | GACCTCTGTCTCTCTCTGGTGTGTT |
| 3348 | TTACCCCACAGTGGGGGGTG | 3979 | GTTTTTTCCTCAAATCAGGAGTC | 4610 | ACCTCTGTCTCTCTCTGGTGTGTTT |
| 3349 | TACCCCACAGTGGGGGGTGG | 3980 | TTTTTTCCTCAAATCAGGAGTCT | 4611 | GGGTCTGGAGTCTAAGATATCTGTAG |
| 3350 | ACCCCACAGTGGGGGGTGGT | 3981 | TTTTTCCTCAAATCAGGAGTCTC | 4612 | GGTCTGGAGTCTAAGATATCTGTAGG |
| 3351 | CCCCACAGTGGGGGGTGGTG | 3982 | TTTTCCTCAAATCAGGAGTCTCT | 4613 | GTCTGGAGTCTAAGATATCTGTAGGT |
| 3352 | CCCACAGTGGGGGGTGGTGA | 3983 | TTTCCTCAAATCAGGAGTCTCTT | 4614 | TCTGGAGTCTAAGATATCTGTAGGTA |
| 3353 | CACAGTGGGGGGTGGTGAAG | 3984 | TTCCTCAAATCAGGAGTCTCTTT | 4615 | CTGGAGTCTAAGATATCTGTAGGTAT |
| 3354 | ACAGTGGGGGGTGGTGAAGT | 3985 | TCCTCAAATCAGGAGTCTCTTTT | 4616 | TGGAGTCTAAGATATCTGTAGGTATG |
| 3355 | AGTGGGGGGTGGTGAAGTAT | 3986 | CCTCAAATCAGGAGTCTCTTTTC | 4617 | GGAGTCTAAGATATCTGTAGGTATGG |
| 3356 | GTGGGGGGTGGTGAAGTATC | 3987 | CTCAAATCAGGAGTCTCTTTTCC | 4618 | GAGTCTAAGATATCTGTAGGTATGGA |
| 3357 | GGGGGGTGGTGAAGTATCTT | 3988 | TCAAATCAGGAGTCTCTTTTCCT | 4619 | AGTCTAAGATATCTGTAGGTATGGAG |
| 3358 | GGGGGTGGTGAAGTATCTTT | 3989 | CAAATCAGGAGTCTCTTTTCCTC | 4620 | GTCTAAGATATCTGTAGGTATGGAGA |
| 3359 | GGGGTGGTGAAGTATCTTTC | 3990 | AATCAGGAGTCTCTTTTCCTCTA | 4621 | TCTAAGATATCTGTAGGTATGGAGAA |
| 3360 | GGGTGGTGAAGTATCTTTCT | 3991 | ATCAGGAGTCTCTTTTCCTCTAG | 4622 | CTAAGATATCTGTAGGTATGGAGAAC |
| 3361 | GGTGGTGAAGTATCTTTCTC | 3992 | TCAGGAGTCTCTTTTCCTCTAGA | 4623 | TAAGATATCTGTAGGTATGGAGAACC |
| 3362 | GTGGTGAAGTATCTTTCTCT | 3993 | CAGGAGTCTCTTTTCCTCTAGAT | 4624 | AAGATATCTGTAGGTATGGAGAACCC |
| 3363 | TGGTGAAGTATCTTTCTCTG | 3994 | AGGAGTCTCTTTTCCTCTAGATT | 4625 | AGATATCTGTAGGTATGGAGAACCCT |
| 3364 | GGTGAAGTATCTTTCTCTGT | 3995 | GGAGTCTCTTTTCCTCTAGATTT | 4626 | GATATCTGTAGGTATGGAGAACCCTT |
| 3365 | GTGAAGTATCTTTCTCTGTG | 3996 | GAGTCTCTTTTCCTCTAGATTTT | 4627 | ATATCTGTAGGTATGGAGAACCCTTT |
| 3366 | TGAAGTATCTTTCTCTGTGG | 3997 | AGTCTCTTTTCCTCTAGATTTTG | 4628 | TATCTGTAGGTATGGAGAACCCTTTT |
| 3367 | GAAGTATCTTTCTCTGTGGG | 3998 | GTCTCTTTTCCTCTAGATTTTGG | 4629 | ATCTGTAGGTATGGAGAACCCTTTTT |
| 3368 | AAGTATCTTTCTCTGTGGGT | 3999 | TCTCTTTTCCTCTAGATTTTGGC | 4630 | TCTGTAGGTATGGAGAACCCTTTTTA |
| 3369 | ATCTTTCTCTGTGGGTCTAG | 4000 | CTCTTTTCCTCTAGATTTTGGCC | 4631 | CTGTAGGTATGGAGAACCCTTTTTAG |
| 3370 | TCTTTCTCTGTGGGTCTAGG | 4001 | TCTTTTCCTCTAGATTTTGGCCC | 4632 | TGTAGGTATGGAGAACCCTTTTTAGA |
| 3371 | CTTTCTCTGTGGGTCTAGGG | 4002 | CTTTTCCTCTAGATTTTGGCCCT | 4633 | GTAGGTATGGAGAACCCTTTTTAGAC |
| 3372 | TTTCTCTGTGGGTCTAGGGT | 4003 | TTTTCCTCTAGATTTTGGCCCTG | 4634 | TAGGTATGGAGAACCCTTTTTAGACT |
| 3373 | TTCTCTGTGGGTCTAGGGTC | 4004 | TTTCCTCTAGATTTTGGCCCTGT | 4635 | AGGTATGGAGAACCCTTTTTAGACTG |
| 3374 | TCTCTGTGGGTCTAGGGTCT | 4005 | TTCCTCTAGATTTTGGCCCTGTG | 4636 | GGTATGGAGAACCCTTTTTAGACTGG |
| 3375 | CTCTGTGGGTCTAGGGTCTC | 4006 | TCCTCTAGATTTTGGCCCTGTGT | 4637 | GTATGGAGAACCCTTTTTAGACTGGA |
| 3376 | TCTGTGGGTCTAGGGTCTCT | 4007 | CCTCTAGATTTTGGCCCTGTGTC | 4638 | TATGGAGAACCCTTTTTAGACTGGAT |
| 3377 | CTGTGGGTCTAGGGTCTCTC | 4008 | CTCTAGATTTTGGCCCTGTGTCT | 4639 | ATGGAGAACCCTTTTTAGACTGGATT |
| 3378 | TGTGGGTCTAGGGTCTCTCT | 4009 | TCTAGATTTTGGCCCTGTGTCTC | 4640 | TGGAGAACCCTTTTTAGACTGGATTT |
| 3379 | GTGGGTCTAGGGTCTCTCTG | 4010 | CTAGATTTTGGCCCTGTGTCTCA | 4641 | GGAGAACCCTTTTTAGACTGGATTTT |
| 3380 | TGGGTCTAGGGTCTCTCTGT | 4011 | TAGATTTTGGCCCTGTGTCTCAA | 4642 | GAGAACCCTTTTTAGACTGGATTTTC |
| 3381 | GGGTCTAGGGTCTCTCTGTC | 4012 | AGATTTTGGCCCTGTGTCTCAAA | 4643 | AGAACCCTTTTTAGACTGGATTTTCA |
| 3382 | GGTCTAGGGTCTCTCTGTCT | 4013 | GATTTTGGCCCTGTGTCTCAAAT | 4644 | GAACCCTTTTTAGACTGGATTTTCAG |
| 3383 | GTCTAGGGTCTCTCTGTCTC | 4014 | ATTTTGGCCCTGTGTCTCAAATT | 4645 | AACCCTTTTTAGACTGGATTTTCAGA |
| 3384 | TCTAGGGTCTCTCTGTCTCA | 4015 | TTTTGGCCCTGTGTCTCAAATTA | 4646 | ACCCTTTTTAGACTGGATTTTCAGAT |
| 3385 | CTAGGGTCTCTCTGTCTCAG | 4016 | TTTGGCCCTGTGTCTCAAATTAC | 4647 | CCCTTTTTAGACTGGATTTTCAGATT |
| 3386 | AGGGTCTCTCTGTCTCAGGG | 4017 | TTGGCCCTGTGTCTCAAATTACC | 4648 | CCTTTTTAGACTGGATTTTCAGATTT |
| 3387 | GTCTCTCTGTCTCAGGGTCT | 4018 | TGGCCCTGTGTCTCAAATTACCC | 4649 | CTTTTTAGACTGGATTTTCAGATTTT |
| 3388 | TCTCTGTCTCAGGGTCTGGG | 4019 | GGCCCTGTGTCTCAAATTACCCC | 4650 | TTTTTAGACTGGATTTTCAGATTTTG |
| 3389 | CTCTGTCTCAGGGTCTGGGG | 4020 | GCCCTGTGTCTCAAATTACCCCA | 4651 | TTTTAGACTGGATTTTCAGATTTTGA |
| 3390 | TCTGTCTCAGGGTCTGGGGT | 4021 | CCCTGTGTCTCAAATTACCCCAC | 4652 | TTTAGACTGGATTTTCAGATTTTGAT |
| 3391 | CTGTCTCAGGGTCTGGGGTC | 4022 | CCTGTGTCTCAAATTACCCCACA | 4653 | TTAGACTGGATTTTCAGATTTTGATA |
| 3392 | GTCTCAGGGTCTGGGGTCTG | 4023 | CTGTGTCTCAAATTACCCCACAG | 4654 | TAGACTGGATTTTCAGATTTTGATAT |
| 3393 | CTCAGGGTCTGGGGTCTGCA | 4024 | TGTGTCTCAAATTACCCCACAGT | 4655 | AGACTGGATTTTCAGATTTTGATATT |
| 3394 | TCAGGGTCTGGGGTCTGCAT | 4025 | GTGTCTCAAATTACCCCACAGTG | 4656 | GACTGGATTTTCAGATTTTGATATTG |
| 3395 | GTCTGGGGTCTGCATCTTTA | 4026 | TGTCTCAAATTACCCCACAGTGG | 4657 | ACTGGATTTTCAGATTTTGATATTGA |
| 3396 | TCTGGGGTCTGCATCTTTAG | 4027 | GTCTCAAATTACCCCACAGTGGG | 4658 | CTGGATTTTCAGATTTTGATATTGAG |
| 3397 | CTGGGGTCTGCATCTTTAGG | 4028 | TCTCAAATTACCCCACAGTGGGG | 4659 | TGGATTTTCAGATTTTGATATTGAGC |
| 3398 | TGGGGTCTGCATCTTTAGGA | 4029 | CTCAAATTACCCCACAGTGGGGG | 4660 | GGATTTTCAGATTTTGATATTGAGCT |
| 3399 | GGGTCTGCATCTTTAGGACC | 4030 | TCAAATTACCCCACAGTGGGGGG | 4661 | GATTTTCAGATTTTGATATTGAGCTT |
| 3400 | GGTCTGCATCTTTAGGACCT | 4031 | CAAATTACCCCACAGTGGGGGGT | 4662 | ATTTTCAGATTTTGATATTGAGCTTC |
| 3401 | TGCATCTTTAGGACCTCTGT | 4032 | AAATTACCCCACAGTGGGGGGTG | 4663 | TTTTCAGATTTTGATATTGAGCTTCT |
| 3402 | CATCTTTAGGACCTCTGTCT | 4033 | AATTACCCCACAGTGGGGGGTGG | 4664 | TTTCAGATTTTGATATTGAGCTTCTC |
| 3403 | ATCTTTAGGACCTCTGTCTC | 4034 | ATTACCCCACAGTGGGGGGTGGT | 4665 | TTCAGATTTTGATATTGAGCTTCTCT |
| 3404 | CTTTAGGACCTCTGTCTCTC | 4035 | TTACCCCACAGTGGGGGGTGGTG | 4666 | TCAGATTTTGATATTGAGCTTCTCTC |
| 3405 | AGGACCTCTGTCTCTCTCTG | 4036 | TACCCCACAGTGGGGGGTGGTGA | 4667 | CAGATTTTGATATTGAGCTTCTCTCT |
| 3406 | GGACCTCTGTCTCTCTCTGG | 4037 | ACCCCACAGTGGGGGGTGGTGAA | 4668 | AGATTTTGATATTGAGCTTCTCTCTC |
| 3407 | CTGTCTCTCTCTGGTGTGTT | 4038 | CCCCACAGTGGGGGGTGGTGAAG | 4669 | GATTTTGATATTGAGCTTCTCTCTCT |
| 3408 | GGGTCTGGAGTCTAAGATATC | 4039 | CCCACAGTGGGGGGTGGTGAAGT | 4670 | ATTTTGATATTGAGCTTCTCTCTCTG |
| 3409 | GGTCTGGAGTCTAAGATATCT | 4040 | CCACAGTGGGGGGTGGTGAAGTA | 4671 | TTTTGATATTGAGCTTCTCTCTCTGG |
| 3410 | GTCTGGAGTCTAAGATATCTG | 4041 | CACAGTGGGGGGTGGTGAAGTAT | 4672 | TTTGATATTGAGCTTCTCTCTCTGGG |
| 3411 | TCTGGAGTCTAAGATATCTGT | 4042 | ACAGTGGGGGGTGGTGAAGTATC | 4673 | TTGATATTGAGCTTCTCTCTCTGGGG |
| 3412 | CTGGAGTCTAAGATATCTGTA | 4043 | CAGTGGGGGGTGGTGAAGTATCT | 4674 | TGATATTGAGCTTCTCTCTCTGGGGG |
| 3413 | TGGAGTCTAAGATATCTGTAG | 4044 | AGTGGGGGGTGGTGAAGTATCTT | 4675 | GATATTGAGCTTCTCTCTCTGGGGGA |
| 3414 | GGAGTCTAAGATATCTGTAGG | 4045 | GTGGGGGGTGGTGAAGTATCTTT | 4676 | ATATTGAGCTTCTCTCTCTGGGGGAT |
| 3415 | GAGTCTAAGATATCTGTAGGT | 4046 | TGGGGGGTGGTGAAGTATCTTTC | 4677 | TATTGAGCTTCTCTCTCTGGGGGATC |
| 3416 | AGTCTAAGATATCTGTAGGTA | 4047 | GGGGGGTGGTGAAGTATCTTTCT | 4678 | ATTGAGCTTCTCTCTCTGGGGGATCT |
| 3417 | GTCTAAGATATCTGTAGGTAT | 4048 | GGGGGTGGTGAAGTATCTTTCTC | 4679 | TTGAGCTTCTCTCTCTGGGGGATCTG |
| 3418 | TCTAAGATATCTGTAGGTATG | 4049 | GGGGTGGTGAAGTATCTTTCTCT | 4680 | TGAGCTTCTCTCTCTGGGGGATCTGG |
| 3419 | CTAAGATATCTGTAGGTATGG | 4050 | GGGTGGTGAAGTATCTTTCTCTG | 4681 | GAGCTTCTCTCTCTGGGGGATCTGGG |
| 3420 | TAAGATATCTGTAGGTATGGA | 4051 | GGTGGTGAAGTATCTTTCTCTGT | 4682 | AGCTTCTCTCTCTGGGGGATCTGGGG |
| 3421 | AAGATATCTGTAGGTATGGAG | 4052 | GTGGTGAAGTATCTTTCTCTGTG | 4683 | GCTTCTCTCTCTGGGGGATCTGGGGT |
| 3422 | AGATATCTGTAGGTATGGAGA | 4053 | TGGTGAAGTATCTTTCTCTGTGG | 4684 | CTTCTCTCTCTGGGGGATCTGGGGTC |
| 3423 | GATATCTGTAGGTATGGAGAA | 4054 | GGTGAAGTATCTTTCTCTGTGGG | 4685 | TTCTCTCTCTGGGGGATCTGGGGTCG |
| 3424 | ATATCTGTAGGTATGGAGAAC | 4055 | GTGAAGTATCTTTCTCTGTGGGT | 4686 | TCTCTCTCTGGGGGATCTGGGGTCGT |
| 3425 | ATCTGTAGGTATGGAGAACCC | 4056 | TGAAGTATCTTTCTCTGTGGGTC | 4687 | CTCTCTCTGGGGGATCTGGGGTCGTT |
| 3426 | TCTGTAGGTATGGAGAACCCT | 4057 | GAAGTATCTTTCTCTGTGGGTCT | 4688 | TCTCTCTGGGGGATCTGGGGTCGTTT |
| 3427 | CTGTAGGTATGGAGAACCCTT | 4058 | AAGTATCTTTCTCTGTGGGTCTA | 4689 | CTCTCTGGGGGATCTGGGGTCGTTTT |
| 3428 | TGTAGGTATGGAGAACCCTTT | 4059 | AGTATCTTTCTCTGTGGGTCTAG | 4690 | TCTCTGGGGGATCTGGGGTCGTTTTT |
| 3429 | GTAGGTATGGAGAACCCTTTT | 4060 | GTATCTTTCTCTGTGGGTCTAGG | 4691 | CTCTGGGGGATCTGGGGTCGTTTTTT |
| 3430 | TAGGTATGGAGAACCCTTTTT | 4061 | TATCTTTCTCTGTGGGTCTAGGG | 4692 | TCTGGGGGATCTGGGGTCGTTTTTTC |
| 3431 | AGGTATGGAGAACCCTTTTTA | 4062 | ATCTTTCTCTGTGGGTCTAGGGT | 4693 | CTGGGGGATCTGGGGTCGTTTTTTCC |
| 3432 | GGTATGGAGAACCCTTTTTAG | 4063 | TCTTTCTCTGTGGGTCTAGGGTC | 4694 | TGGGGGATCTGGGGTCGTTTTTTCCT |
| 3433 | GTATGGAGAACCCTTTTTAGA | 4064 | CTTTCTCTGTGGGTCTAGGGTCT | 4695 | GGGGGATCTGGGGTCGTTTTTTCCTC |
| 3434 | TATGGAGAACCCTTTTTAGAC | 4065 | TTTCTCTGTGGGTCTAGGGTCTC | 4696 | GGGGATCTGGGGTCGTTTTTTCCTCA |
| 3435 | ATGGAGAACCCTTTTTAGACT | 4066 | TTCTCTGTGGGTCTAGGGTCTCT | 4697 | GGGATCTGGGGTCGTTTTTTCCTCAA |
| 3436 | TGGAGAACCCTTTTTAGACTG | 4067 | TCTCTGTGGGTCTAGGGTCTCTC | 4698 | GGATCTGGGGTCGTTTTTTCCTCAAA |
| 3437 | GGAGAACCCTTTTTAGACTGG | 4068 | CTCTGTGGGTCTAGGGTCTCTCT | 4699 | GATCTGGGGTCGTTTTTTCCTCAAAT |
| 3438 | GAGAACCCTTTTTAGACTGGA | 4069 | TCTGTGGGTCTAGGGTCTCTCTG | 4700 | ATCTGGGGTCGTTTTTTCCTCAAATC |
| 3439 | AGAACCCTTTTTAGACTGGAT | 4070 | CTGTGGGTCTAGGGTCTCTCTGT | 4701 | TCTGGGGTCGTTTTTTCCTCAAATCA |
| 3440 | GAACCCTTTTTAGACTGGATT | 4071 | TGTGGGTCTAGGGTCTCTCTGTC | 4702 | CTGGGGTCGTTTTTTCCTCAAATCAG |
| 3441 | AACCCTTTTTAGACTGGATTT | 4072 | GTGGGTCTAGGGTCTCTCTGTCT | 4703 | TGGGGTCGTTTTTTCCTCAAATCAGG |
| 3442 | ACCCTTTTTAGACTGGATTTT | 4073 | TGGGTCTAGGGTCTCTCTGTCTC | 4704 | GGGGTCGTTTTTTCCTCAAATCAGGA |
| 3443 | CCCTTTTTAGACTGGATTTTC | 4074 | GGGTCTAGGGTCTCTCTGTCTCA | 4705 | GGGTCGTTTTTTCCTCAAATCAGGAG |
| 3444 | CCTTTTTAGACTGGATTTTCA | 4075 | GGTCTAGGGTCTCTCTGTCTCAG | 4706 | GGTCGTTTTTTCCTCAAATCAGGAGT |
| 3445 | CTTTTTAGACTGGATTTTCAG | 4076 | GTCTAGGGTCTCTCTGTCTCAGG | 4707 | GTCGTTTTTTCCTCAAATCAGGAGTC |
| 3446 | TTTTTAGACTGGATTTTCAGA | 4077 | TCTAGGGTCTCTCTGTCTCAGGG | 4708 | TCGTTTTTTCCTCAAATCAGGAGTCT |
| 3447 | TTTTAGACTGGATTTTCAGAT | 4078 | CTAGGGTCTCTCTGTCTCAGGGT | 4709 | CGTTTTTTCCTCAAATCAGGAGTCTC |
| 3448 | TTTAGACTGGATTTTCAGATT | 4079 | TAGGGTCTCTCTGTCTCAGGGTC | 4710 | GTTTTTTCCTCAAATCAGGAGTCTCT |
| 3449 | TTAGACTGGATTTTCAGATTT | 4080 | AGGGTCTCTCTGTCTCAGGGTCT | 4711 | TTTTTTCCTCAAATCAGGAGTCTCTT |
| 3450 | TAGACTGGATTTTCAGATTTT | 4081 | GGGTCTCTCTGTCTCAGGGTCTG | 4712 | TTTTTCCTCAAATCAGGAGTCTCTTT |
| 3451 | AGACTGGATTTTCAGATTTTG | 4082 | GGTCTCTCTGTCTCAGGGTCTGG | 4713 | TTTTCCTCAAATCAGGAGTCTCTTTT |
| 3452 | GACTGGATTTTCAGATTTTGA | 4083 | GTCTCTCTGTCTCAGGGTCTGGG | 4714 | TTTCCTCAAATCAGGAGTCTCTTTTC |
| 3453 | ACTGGATTTTCAGATTTTGAT | 4084 | TCTCTCTGTCTCAGGGTCTGGGG | 4715 | TTCCTCAAATCAGGAGTCTCTTTTCC |
| 3454 | CTGGATTTTCAGATTTTGATA | 4085 | CTCTCTGTCTCAGGGTCTGGGGT | 4716 | TCCTCAAATCAGGAGTCTCTTTTCCT |
| 3455 | GGATTTTCAGATTTTGATATT | 4086 | TCTCTGTCTCAGGGTCTGGGGTC | 4717 | CCTCAAATCAGGAGTCTCTTTTCCTC |
| 3456 | GATTTTCAGATTTTGATATTG | 4087 | CTCTGTCTCAGGGTCTGGGGTCT | 4718 | CTCAAATCAGGAGTCTCTTTTCCTCT |
| 3457 | ATTTTCAGATTTTGATATTGA | 4088 | TCTGTCTCAGGGTCTGGGGTCTG | 4719 | TCAAATCAGGAGTCTCTTTTCCTCTA |
| 3458 | TTTTCAGATTTTGATATTGAG | 4089 | CTGTCTCAGGGTCTGGGGTCTGC | 4720 | CAAATCAGGAGTCTCTTTTCCTCTAG |
| 3459 | TTTCAGATTTTGATATTGAGC | 4090 | TGTCTCAGGGTCTGGGGTCTGCA | 4721 | AAATCAGGAGTCTCTTTTCCTCTAGA |
| 3460 | TTCAGATTTTGATATTGAGCT | 4091 | GTCTCAGGGTCTGGGGTCTGCAT | 4722 | AATCAGGAGTCTCTTTTCCTCTAGAT |
| 3461 | TCAGATTTTGATATTGAGCTT | 4092 | TCTCAGGGTCTGGGGTCTGCATC | 4723 | ATCAGGAGTCTCTTTTCCTCTAGATT |
| 3462 | CAGATTTTGATATTGAGCTTC | 4093 | CTCAGGGTCTGGGGTCTGCATCT | 4724 | TCAGGAGTCTCTTTTCCTCTAGATTT |
| 3463 | AGATTTTGATATTGAGCTTCT | 4094 | TCAGGGTCTGGGGTCTGCATCTT | 4725 | CAGGAGTCTCTTTTCCTCTAGATTTT |
| 3464 | GATTTTGATATTGAGCTTCTC | 4095 | CAGGGTCTGGGGTCTGCATCTTT | 4726 | AGGAGTCTCTTTTCCTCTAGATTTTG |
| 3465 | ATTTTGATATTGAGCTTCTCT | 4096 | AGGGTCTGGGGTCTGCATCTTTA | 4727 | GGAGTCTCTTTTCCTCTAGATTTTGG |
| 3466 | TTTTGATATTGAGCTTCTCTC | 4097 | GGGTCTGGGGTCTGCATCTTTAG | 4728 | GAGTCTCTTTTCCTCTAGATTTTGGC |
| 3467 | TTTGATATTGAGCTTCTCTCT | 4098 | GGTCTGGGGTCTGCATCTTTAGG | 4729 | AGTCTCTTTTCCTCTAGATTTTGGCC |
| 3468 | TTGATATTGAGCTTCTCTCTC | 4099 | GTCTGGGGTCTGCATCTTTAGGA | 4730 | GTCTCTTTTCCTCTAGATTTTGGCCC |
| 3469 | TGATATTGAGCTTCTCTCTCT | 4100 | TCTGGGGTCTGCATCTTTAGGAC | 4731 | TCTCTTTTCCTCTAGATTTTGGCCCT |
| 3470 | GATATTGAGCTTCTCTCTCTG | 4101 | CTGGGGTCTGCATCTTTAGGACC | 4732 | CTCTTTTCCTCTAGATTTTGGCCCTG |
| 3471 | ATATTGAGCTTCTCTCTCTGG | 4102 | TGGGGTCTGCATCTTTAGGACCT | 4733 | TCTTTTCCTCTAGATTTTGGCCCTGT |
| 3472 | TATTGAGCTTCTCTCTCTGGG | 4103 | GGGGTCTGCATCTTTAGGACCTC | 4734 | CTTTTCCTCTAGATTTTGGCCCTGTG |
| 3473 | ATTGAGCTTCTCTCTCTGGGG | 4104 | GGGTCTGCATCTTTAGGACCTCT | 4735 | TTTTCCTCTAGATTTTGGCCCTGTGT |
| 3474 | TTGAGCTTCTCTCTCTGGGGG | 4105 | GGTCTGCATCTTTAGGACCTCTG | 4736 | TTTCCTCTAGATTTTGGCCCTGTGTC |
| 3475 | TGAGCTTCTCTCTCTGGGGGA | 4106 | GTCTGCATCTTTAGGACCTCTGT | 4737 | TTCCTCTAGATTTTGGCCCTGTGTCT |
| 3476 | GAGCTTCTCTCTCTGGGGGAT | 4107 | TCTGCATCTTTAGGACCTCTGTC | 4738 | TCCTCTAGATTTTGGCCCTGTGTCTC |
| 3477 | AGCTTCTCTCTCTGGGGGATC | 4108 | CTGCATCTTTAGGACCTCTGTCT | 4739 | CCTCTAGATTTTGGCCCTGTGTCTCA |
| 3478 | GCTTCTCTCTCTGGGGGATCT | 4109 | TGCATCTTTAGGACCTCTGTCTC | 4740 | CTCTAGATTTTGGCCCTGTGTCTCAA |
| 3479 | CTTCTCTCTCTGGGGGATCTG | 4110 | GCATCTTTAGGACCTCTGTCTCT | 4741 | TCTAGATTTTGGCCCTGTGTCTCAAA |
| 3480 | TTCTCTCTCTGGGGGATCTGG | 4111 | CATCTTTAGGACCTCTGTCTCTC | 4742 | CTAGATTTTGGCCCTGTGTCTCAAAT |
| 3481 | TCTCTCTCTGGGGGATCTGGG | 4112 | ATCTTTAGGACCTCTGTCTCTCT | 4743 | TAGATTTTGGCCCTGTGTCTCAAATT |
| 3482 | CTCTCTCTGGGGGATCTGGGG | 4113 | TCTTTAGGACCTCTGTCTCTCTC | 4744 | AGATTTTGGCCCTGTGTCTCAAATTA |
| 3483 | TCTCTCTGGGGGATCTGGGGT | 4114 | CTTTAGGACCTCTGTCTCTCTCT | 4745 | GATTTTGGCCCTGTGTCTCAAATTAC |
| 3484 | CTCTCTGGGGGATCTGGGGTC | 4115 | TTTAGGACCTCTGTCTCTCTCTG | 4746 | ATTTTGGCCCTGTGTCTCAAATTACC |
| 3485 | TCTCTGGGGGATCTGGGGTCG | 4116 | TTAGGACCTCTGTCTCTCTCTGG | 4747 | TTTTGGCCCTGTGTCTCAAATTACCC |
| 3486 | CTCTGGGGGATCTGGGGTCGT | 4117 | TAGGACCTCTGTCTCTCTCTGGT | 4748 | TTTGGCCCTGTGTCTCAAATTACCCC |
| 3487 | TCTGGGGGATCTGGGGTCGTT | 4118 | AGGACCTCTGTCTCTCTCTGGTG | 4749 | TTGGCCCTGTGTCTCAAATTACCCCA |
| 3488 | CTGGGGGATCTGGGGTCGTTT | 4119 | GGACCTCTGTCTCTCTCTGGTGT | 4750 | TGGCCCTGTGTCTCAAATTACCCCAC |
| 3489 | TGGGGGATCTGGGGTCGTTTT | 4120 | GACCTCTGTCTCTCTCTGGTGTG | 4751 | GGCCCTGTGTCTCAAATTACCCCACA |
| 3490 | GGGGGATCTGGGGTCGTTTTT | 4121 | ACCTCTGTCTCTCTCTGGTGTGT | 4752 | GCCCTGTGTCTCAAATTACCCCACAG |
| 3491 | GGGGATCTGGGGTCGTTTTTT | 4122 | CCTCTGTCTCTCTCTGGTGTGTT | 4753 | CCCTGTGTCTCAAATTACCCCACAGT |
| 3492 | GGGATCTGGGGTCGTTTTTTC | 4123 | CTCTGTCTCTCTCTGGTGTGTTT | 4754 | CCTGTGTCTCAAATTACCCCACAGTG |
| 3493 | GGATCTGGGGTCGTTTTTTCC | 4124 | GGGTCTGGAGTCTAAGATATCTGT | 4755 | CTGTGTCTCAAATTACCCCACAGTGG |
| 3494 | GATCTGGGGTCGTTTTTTCCT | 4125 | GGTCTGGAGTCTAAGATATCTGTA | 4756 | TGTGTCTCAAATTACCCCACAGTGGG |
| 3495 | ATCTGGGGTCGTTTTTTCCTC | 4126 | GTCTGGAGTCTAAGATATCTGTAG | 4757 | GTGTCTCAAATTACCCCACAGTGGGG |
| 3496 | TCTGGGGTCGTTTTTTCCTCA | 4127 | TCTGGAGTCTAAGATATCTGTAGG | 4758 | TGTCTCAAATTACCCCACAGTGGGGG |
| 3497 | TGGGGTCGTTTTTTCCTCAAA | 4128 | CTGGAGTCTAAGATATCTGTAGGT | 4759 | GTCTCAAATTACCCCACAGTGGGGGG |
| 3498 | GGGGTCGTTTTTTCCTCAAAT | 4129 | TGGAGTCTAAGATATCTGTAGGTA | 4760 | TCTCAAATTACCCCACAGTGGGGGGT |
| 3499 | GGGTCGTTTTTTCCTCAAATC | 4130 | GGAGTCTAAGATATCTGTAGGTAT | 4761 | CTCAAATTACCCCACAGTGGGGGGTG |
| 3500 | GGTCGTTTTTTCCTCAAATCA | 4131 | GAGTCTAAGATATCTGTAGGTATG | 4762 | TCAAATTACCCCACAGTGGGGGGTGG |
| 3501 | GTCGTTTTTTCCTCAAATCAG | 4132 | AGTCTAAGATATCTGTAGGTATGG | 4763 | CAAATTACCCCACAGTGGGGGGTGGT |
| 3502 | TCGTTTTTTCCTCAAATCAGG | 4133 | GTCTAAGATATCTGTAGGTATGGA | 4764 | AAATTACCCCACAGTGGGGGGTGGTG |
| 3503 | CGTTTTTTCCTCAAATCAGGA | 4134 | TCTAAGATATCTGTAGGTATGGAG | 4765 | AATTACCCCACAGTGGGGGGTGGTGA |
| 3504 | GTTTTTTCCTCAAATCAGGAG | 4135 | CTAAGATATCTGTAGGTATGGAGA | 4766 | ATTACCCCACAGTGGGGGGTGGTGAA |
| 3505 | TTTTTTCCTCAAATCAGGAGT | 4136 | TAAGATATCTGTAGGTATGGAGAA | 4767 | TTACCCCACAGTGGGGGGTGGTGAAG |
| 3506 | TTTTTCCTCAAATCAGGAGTC | 4137 | AAGATATCTGTAGGTATGGAGAAC | 4768 | TACCCCACAGTGGGGGGTGGTGAAGT |
| 3507 | TTTTCCTCAAATCAGGAGTCT | 4138 | AGATATCTGTAGGTATGGAGAACC | 4769 | ACCCCACAGTGGGGGGTGGTGAAGTA |
| 3508 | TTTCCTCAAATCAGGAGTCTC | 4139 | GATATCTGTAGGTATGGAGAACCC | 4770 | CCCCACAGTGGGGGGTGGTGAAGTAT |
| 3509 | TTCCTCAAATCAGGAGTCTCT | 4140 | ATATCTGTAGGTATGGAGAACCCT | 4771 | CCCACAGTGGGGGGTGGTGAAGTATC |
| 3510 | TCCTCAAATCAGGAGTCTCTT | 4141 | TATCTGTAGGTATGGAGAACCCTT | 4772 | CCACAGTGGGGGGTGGTGAAGTATCT |
| 3511 | CCTCAAATCAGGAGTCTCTTT | 4142 | ATCTGTAGGTATGGAGAACCCTTT | 4773 | CACAGTGGGGGGTGGTGAAGTATCTT |
| 3512 | CTCAAATCAGGAGTCTCTTTT | 4143 | TCTGTAGGTATGGAGAACCCTTTT | 4774 | ACAGTGGGGGGTGGTGAAGTATCTTT |
| 3513 | TCAAATCAGGAGTCTCTTTTC | 4144 | CTGTAGGTATGGAGAACCCTTTTT | 4775 | CAGTGGGGGGTGGTGAAGTATCTTTC |
| 3514 | CAAATCAGGAGTCTCTTTTCC | 4145 | TGTAGGTATGGAGAACCCTTTTTA | 4776 | AGTGGGGGGTGGTGAAGTATCTTTCT |
| 3515 | TCAGGAGTCTCTTTTCCTCTA | 4146 | GTAGGTATGGAGAACCCTTTTTAG | 4777 | GTGGGGGGTGGTGAAGTATCTTTCTC |
| 3516 | CAGGAGTCTCTTTTCCTCTAG | 4147 | TAGGTATGGAGAACCCTTTTTAGA | 4778 | TGGGGGGTGGTGAAGTATCTTTCTCT |
| 3517 | AGGAGTCTCTTTTCCTCTAGA | 4148 | AGGTATGGAGAACCCTTTTTAGAC | 4779 | GGGGGGTGGTGAAGTATCTTTCTCTG |
| 3518 | GGAGTCTCTTTTCCTCTAGAT | 4149 | GGTATGGAGAACCCTTTTTAGACT | 4780 | GGGGGTGGTGAAGTATCTTTCTCTGT |
| 3519 | GAGTCTCTTTTCCTCTAGATT | 4150 | GTATGGAGAACCCTTTTTAGACTG | 4781 | GGGGTGGTGAAGTATCTTTCTCTGTG |
| 3520 | AGTCTCTTTTCCTCTAGATTT | 4151 | TATGGAGAACCCTTTTTAGACTGG | 4782 | GGGTGGTGAAGTATCTTTCTCTGTGG |
| 3521 | CTCTTTTCCTCTAGATTTTGG | 4152 | ATGGAGAACCCTTTTTAGACTGGA | 4783 | GGTGGTGAAGTATCTTTCTCTGTGGG |
| 3522 | TCTTTTCCTCTAGATTTTGGC | 4153 | TGGAGAACCCTTTTTAGACTGGAT | 4784 | GTGGTGAAGTATCTTTCTCTGTGGGT |
| 3523 | CTTTTCCTCTAGATTTTGGCC | 4154 | GGAGAACCCTTTTTAGACTGGATT | 4785 | TGGTGAAGTATCTTTCTCTGTGGGTC |
| 3524 | TTTTCCTCTAGATTTTGGCCC | 4155 | GAGAACCCTTTTTAGACTGGATTT | 4786 | GGTGAAGTATCTTTCTCTGTGGGTCT |
| 3525 | TTTCCTCTAGATTTTGGCCCT | 4156 | AGAACCCTTTTTAGACTGGATTTT | 4787 | GTGAAGTATCTTTCTCTGTGGGTCTA |
| 3526 | TTCCTCTAGATTTTGGCCCTG | 4157 | GAACCCTTTTTAGACTGGATTTTC | 4788 | TGAAGTATCTTTCTCTGTGGGTCTAG |
| 3527 | TCCTCTAGATTTTGGCCCTGT | 4158 | AACCCTTTTTAGACTGGATTTTCA | 4789 | GAAGTATCTTTCTCTGTGGGTCTAGG |
| 3528 | CCTCTAGATTTTGGCCCTGTG | 4159 | ACCCTTTTTAGACTGGATTTTCAG | 4790 | AAGTATCTTTCTCTGTGGGTCTAGGG |
| 3529 | CTCTAGATTTTGGCCCTGTGT | 4160 | CCCTTTTTAGACTGGATTTTCAGA | 4791 | AGTATCTTTCTCTGTGGGTCTAGGGT |
| 3530 | TCTAGATTTTGGCCCTGTGTC | 4161 | CCTTTTTAGACTGGATTTTCAGAT | 4792 | GTATCTTTCTCTGTGGGTCTAGGGTC |
| 3531 | CTAGATTTTGGCCCTGTGTCT | 4162 | CTTTTTAGACTGGATTTTCAGATT | 4793 | TATCTTTCTCTGTGGGTCTAGGGTCT |
| 3532 | TAGATTTTGGCCCTGTGTCTC | 4163 | TTTTTAGACTGGATTTTCAGATTT | 4794 | ATCTTTCTCTGTGGGTCTAGGGTCTC |
| 3533 | AGATTTTGGCCCTGTGTCTCA | 4164 | TTTTAGACTGGATTTTCAGATTTT | 4795 | TCTTTCTCTGTGGGTCTAGGGTCTCT |
| 3534 | GATTTTGGCCCTGTGTCTCAA | 4165 | TTTAGACTGGATTTTCAGATTTTG | 4796 | CTTTCTCTGTGGGTCTAGGGTCTCTC |
| 3535 | ATTTTGGCCCTGTGTCTCAAA | 4166 | TTAGACTGGATTTTCAGATTTTGA | 4797 | TTTCTCTGTGGGTCTAGGGTCTCTCT |
| 3536 | TTTTGGCCCTGTGTCTCAAAT | 4167 | TAGACTGGATTTTCAGATTTTGAT | 4798 | TTCTCTGTGGGTCTAGGGTCTCTCTG |
| 3537 | TTTGGCCCTGTGTCTCAAATT | 4168 | AGACTGGATTTTCAGATTTTGATA | 4799 | TCTCTGTGGGTCTAGGGTCTCTCTGT |
| 3538 | TTGGCCCTGTGTCTCAAATTA | 4169 | GACTGGATTTTCAGATTTTGATAT | 4800 | CTCTGTGGGTCTAGGGTCTCTCTGTC |
| 3539 | TGGCCCTGTGTCTCAAATTAC | 4170 | ACTGGATTTTCAGATTTTGATATT | 4801 | TCTGTGGGTCTAGGGTCTCTCTGTCT |
| 3540 | GGCCCTGTGTCTCAAATTACC | 4171 | CTGGATTTTCAGATTTTGATATTG | 4802 | CTGTGGGTCTAGGGTCTCTCTGTCTC |
| 3541 | GCCCTGTGTCTCAAATTACCC | 4172 | TGGATTTTCAGATTTTGATATTGA | 4803 | TGTGGGTCTAGGGTCTCTCTGTCTCA |
| 3542 | CCCTGTGTCTCAAATTACCCC | 4173 | GGATTTTCAGATTTTGATATTGAG | 4804 | GTGGGTCTAGGGTCTCTCTGTCTCAG |
| 3543 | CCTGTGTCTCAAATTACCCCA | 4174 | GATTTTCAGATTTTGATATTGAGC | 4805 | TGGGTCTAGGGTCTCTCTGTCTCAGG |
| 3544 | CTGTGTCTCAAATTACCCCAC | 4175 | ATTTTCAGATTTTGATATTGAGCT | 4806 | GGGTCTAGGGTCTCTCTGTCTCAGGG |
| 3545 | TGTGTCTCAAATTACCCCACA | 4176 | TTTTCAGATTTTGATATTGAGCTT | 4807 | GGTCTAGGGTCTCTCTGTCTCAGGGT |
| 3546 | GTGTCTCAAATTACCCCACAG | 4177 | TTTCAGATTTTGATATTGAGCTTC | 4808 | GTCTAGGGTCTCTCTGTCTCAGGGTC |
| 3547 | TGTCTCAAATTACCCCACAGT | 4178 | TTCAGATTTTGATATTGAGCTTCT | 4809 | TCTAGGGTCTCTCTGTCTCAGGGTCT |
| 3548 | GTCTCAAATTACCCCACAGTG | 4179 | TCAGATTTTGATATTGAGCTTCTC | 4810 | CTAGGGTCTCTCTGTCTCAGGGTCTG |
| 3549 | TCTCAAATTACCCCACAGTGG | 4180 | CAGATTTTGATATTGAGCTTCTCT | 4811 | TAGGGTCTCTCTGTCTCAGGGTCTGG |
| 3550 | CTCAAATTACCCCACAGTGGG | 4181 | AGATTTTGATATTGAGCTTCTCTC | 4812 | AGGGTCTCTCTGTCTCAGGGTCTGGG |
| 3551 | TCAAATTACCCCACAGTGGGG | 4182 | GATTTTGATATTGAGCTTCTCTCT | 4813 | GGGTCTCTCTGTCTCAGGGTCTGGGG |
| 3552 | CAAATTACCCCACAGTGGGGG | 4183 | ATTTTGATATTGAGCTTCTCTCTC | 4814 | GGTCTCTCTGTCTCAGGGTCTGGGGT |
| 3553 | AAATTACCCCACAGTGGGGGG | 4184 | TTTTGATATTGAGCTTCTCTCTCT | 4815 | GTCTCTCTGTCTCAGGGTCTGGGGTC |
| 3554 | AATTACCCCACAGTGGGGGGT | 4185 | TTTGATATTGAGCTTCTCTCTCTG | 4816 | TCTCTCTGTCTCAGGGTCTGGGGTCT |
| 3555 | ATTACCCCACAGTGGGGGGTG | 4186 | TTGATATTGAGCTTCTCTCTCTGG | 4817 | CTCTCTGTCTCAGGGTCTGGGGTCTG |
| 3556 | TTACCCCACAGTGGGGGGTGG | 4187 | TGATATTGAGCTTCTCTCTCTGGG | 4818 | TCTCTGTCTCAGGGTCTGGGGTCTGC |
| 3557 | TACCCCACAGTGGGGGGTGGT | 4188 | GATATTGAGCTTCTCTCTCTGGGG | 4819 | CTCTGTCTCAGGGTCTGGGGTCTGCA |
| 3558 | ACCCCACAGTGGGGGGTGGTG | 4189 | ATATTGAGCTTCTCTCTCTGGGGG | 4820 | TCTGTCTCAGGGTCTGGGGTCTGCAT |
| 3559 | CCCCACAGTGGGGGGTGGTGA | 4190 | TATTGAGCTTCTCTCTCTGGGGGA | 4821 | CTGTCTCAGGGTCTGGGGTCTGCATC |
| 3560 | CCCACAGTGGGGGGTGGTGAA | 4191 | ATTGAGCTTCTCTCTCTGGGGGAT | 4822 | TGTCTCAGGGTCTGGGGTCTGCATCT |
| 3561 | CCACAGTGGGGGGTGGTGAAG | 4192 | TTGAGCTTCTCTCTCTGGGGGATC | 4823 | GTCTCAGGGTCTGGGGTCTGCATCTT |
| 3562 | CACAGTGGGGGGTGGTGAAGT | 4193 | TGAGCTTCTCTCTCTGGGGGATCT | 4824 | TCTCAGGGTCTGGGGTCTGCATCTTT |
| 3563 | ACAGTGGGGGGTGGTGAAGTA | 4194 | GAGCTTCTCTCTCTGGGGGATCTG | 4825 | CTCAGGGTCTGGGGTCTGCATCTTTA |
| 3564 | CAGTGGGGGGTGGTGAAGTAT | 4195 | AGCTTCTCTCTCTGGGGGATCTGG | 4826 | TCAGGGTCTGGGGTCTGCATCTTTAG |
| 3565 | AGTGGGGGGTGGTGAAGTATC | 4196 | GCTTCTCTCTCTGGGGGATCTGGG | 4827 | CAGGGTCTGGGGTCTGCATCTTTAGG |
| 3566 | GTGGGGGGTGGTGAAGTATCT | 4197 | CTTCTCTCTCTGGGGGATCTGGGG | 4828 | AGGGTCTGGGGTCTGCATCTTTAGGA |
| 3567 | TGGGGGGTGGTGAAGTATCTT | 4198 | TTCTCTCTCTGGGGGATCTGGGGT | 4829 | GGGTCTGGGGTCTGCATCTTTAGGAC |
| 3568 | GGGGGGTGGTGAAGTATCTTT | 4199 | TCTCTCTCTGGGGGATCTGGGGTC | 4830 | GGTCTGGGGTCTGCATCTTTAGGACC |
| 3569 | GGGGGTGGTGAAGTATCTTTC | 4200 | CTCTCTCTGGGGGATCTGGGGTCG | 4831 | GTCTGGGGTCTGCATCTTTAGGACCT |
| 3570 | GGGGTGGTGAAGTATCTTTCT | 4201 | TCTCTCTGGGGGATCTGGGGTCGT | 4832 | TCTGGGGTCTGCATCTTTAGGACCTC |
| 3571 | GGGTGGTGAAGTATCTTTCTC | 4202 | CTCTCTGGGGGATCTGGGGTCGTT | 4833 | CTGGGGTCTGCATCTTTAGGACCTCT |
| 3572 | GGTGGTGAAGTATCTTTCTCT | 4203 | TCTCTGGGGGATCTGGGGTCGTTT | 4834 | TGGGGTCTGCATCTTTAGGACCTCTG |
| 3573 | GTGGTGAAGTATCTTTCTCTG | 4204 | CTCTGGGGGATCTGGGGTCGTTTT | 4835 | GGGGTCTGCATCTTTAGGACCTCTGT |
| 3574 | TGGTGAAGTATCTTTCTCTGT | 4205 | TCTGGGGGATCTGGGGTCGTTTTT | 4836 | GGGTCTGCATCTTTAGGACCTCTGTC |
| 3575 | GGTGAAGTATCTTTCTCTGTG | 4206 | CTGGGGGATCTGGGGTCGTTTTTT | 4837 | GGTCTGCATCTTTAGGACCTCTGTCT |
| 3576 | GTGAAGTATCTTTCTCTGTGG | 4207 | TGGGGGATCTGGGGTCGTTTTTTC | 4838 | GTCTGCATCTTTAGGACCTCTGTCTC |
| 3577 | TGAAGTATCTTTCTCTGTGGG | 4208 | GGGGGATCTGGGGTCGTTTTTTCC | 4839 | TCTGCATCTTTAGGACCTCTGTCTCT |
| 3578 | GAAGTATCTTTCTCTGTGGGT | 4209 | GGGGATCTGGGGTCGTTTTTTCCT | 4840 | CTGCATCTTTAGGACCTCTGTCTCTC |
| 3579 | AAGTATCTTTCTCTGTGGGTC | 4210 | GGGATCTGGGGTCGTTTTTTCCTC | 4841 | TGCATCTTTAGGACCTCTGTCTCTCT |
| 3580 | GTATCTTTCTCTGTGGGTCTA | 4211 | GGATCTGGGGTCGTTTTTTCCTCA | 4842 | GCATCTTTAGGACCTCTGTCTCTCTC |
| 3581 | TATCTTTCTCTGTGGGTCTAG | 4212 | GATCTGGGGTCGTTTTTTCCTCAA | 4843 | CATCTTTAGGACCTCTGTCTCTCTCT |
| 3582 | ATCTTTCTCTGTGGGTCTAGG | 4213 | ATCTGGGGTCGTTTTTTCCTCAAA | 4844 | ATCTTTAGGACCTCTGTCTCTCTCTG |
| 3583 | TCTTTCTCTGTGGGTCTAGGG | 4214 | TCTGGGGTCGTTTTTTCCTCAAAT | 4845 | TCTTTAGGACCTCTGTCTCTCTCTGG |
| 3584 | CTTTCTCTGTGGGTCTAGGGT | 4215 | CTGGGGTCGTTTTTTCCTCAAATC | 4846 | CTTTAGGACCTCTGTCTCTCTCTGGT |
| 3585 | TTTCTCTGTGGGTCTAGGGTC | 4216 | TGGGGTCGTTTTTTCCTCAAATCA | 4847 | TTTAGGACCTCTGTCTCTCTCTGGTG |
| 3586 | TTCTCTGTGGGTCTAGGGTCT | 4217 | GGGGTCGTTTTTTCCTCAAATCAG | 4848 | TTAGGACCTCTGTCTCTCTCTGGTGT |
| 3587 | TCTCTGTGGGTCTAGGGTCTC | 4218 | GGGTCGTTTTTTCCTCAAATCAGG | 4849 | TAGGACCTCTGTCTCTCTCTGGTGTG |
| 3588 | CTCTGTGGGTCTAGGGTCTCT | 4219 | GGTCGTTTTTTCCTCAAATCAGGA | 4850 | AGGACCTCTGTCTCTCTCTGGTGTGT |
| 3589 | TCTGTGGGTCTAGGGTCTCTC | 4220 | GTCGTTTTTTCCTCAAATCAGGAG | 4851 | GGACCTCTGTCTCTCTCTGGTGTGTT |
| 3590 | CTGTGGGTCTAGGGTCTCTCT | 4221 | TCGTTTTTTCCTCAAATCAGGAGT | 4852 | GACCTCTGTCTCTCTCTGGTGTGTTT |
| 3591 | TGTGGGTCTAGGGTCTCTCTG | 4222 | CGTTTTTTCCTCAAATCAGGAGTC | | |
| 3592 | GTGGGTCTAGGGTCTCTCTGT | 4223 | GTTTTTTCCTCAAATCAGGAGTCT | | |

[0093] In some embodiments, an ASO provided herein comprises 16, 17, 18, 19, 20, 21, 22, 23, 24, 26, or 26 of the nucleotide sequence of an ASO provided in Table 2-4. For example, an ASO can comprise the first (from 5′ to 3′) 16, 17, 18, 19, 20, 21, 22, 23, 24, 25, or 26 nucleotides of any one of SEQ ID NOs: 10-4852, e.g., nucleotides at positions 1 to any one of positions 16, 17, 18, 19, 21, 22, 23, 24, 25, or 26 of any one of SEQ ID NOs: 10-4852. Alternatively, an ASO can comprise the last 16, 17, 18, 19, 20, 21, 22, 23, 24, or 25, nucleotides of any one of SEQ ID NOs: 10-4852, e.g., nucleotides at positions 2, 3, 4, 5, 6, 7, 8, 9, or 10 to positions 16, 17, 18, 19, 20, 21, 22, 23, 24, 25, or 26 of any one of SEQ ID NOs: 10-4852. For example, an ASO provided herein comprises the nucleotide sequence of nucleotides at positions 1 to 16, 1 to 17, 1 to 18, 1 to 19, 1 to 20, 1 to 21, 1 to 22, 1 to 23, 1 to 24, 1 to 25, 1 to 26, 2 to 17, 2 to 18, 2 to 19, 2 to 20, 2 to 21, 2 to 22, 2 to 23, 2 to 24, 2 to 25, 2 to 26, 3 to 18, 3 to 19, 3 to 20, 3 to 21, 3 to 22, 3 to 23, 3 to 24, 3 to 25, 3 to 26, 4 to 19, 4 to 20, 4 to 21, 4 to 22, 4 to 23, 4 to 24, 4 to 25, 4 to 26, 5 to 20, 5 to 21, 5 to 22, 5 to 23, 5 to 24, 5 to 25, 5 to 26, 6 to 21, 6 to 22, 6 to 23, 6 to 24, 6 to 25, 6 to 26, 7 to 22, 7 to 23, 7 to 24, 7 to 25, 7 to 26, 8 to 23, 8 to 24, 8 to 25, 8 to 26, 9 to 24, 9 to 25, 9 to 26, 10 to 25, or 10 to 26 of any one of SEQ ID NOs: 10-4852. In some embodiments, an ASO provided herein comprises the nucleotide sequence of nucleotides at positions 1 to 16, 2 to 17, 3 to 18, 4 to 19, 5 to 20, 6 to 21, 7 to 23, 8 to 24, 9 to 25, or 10-26 of any one of SEQ ID NOs: 10-4852. In such embodiments, the ASO is at least 16, 17, 18, 19, or 20 nucleotides in length.

[0094] In some embodiments, the ASO comprises the nucleotide sequence of at least 8 contiguous nucleotides of chr6:33419695-33419939. In some embodiments, the ASO comprises the nucleotide sequence of at least 8 contiguous nucleotides of chr6:33453987-33454269. In some embodiments, the ASO comprises the nucleotide sequence of at least 8 contiguous nucleotides of chr6:33419674-33419940. In such embodiments, the at least 8 contiguous nucleotides of chromosome 6 (chr6) are the plus-strand nucleotides of chromosome 6 as compared to a reference genome.

[0095] In some aspects, an ASO provided herein comprises the nucleotide sequence of any one of SEQ ID NOs: 10-4852, plus up to four additional nucleotides at the 5′ end of said nucleotide sequence that are complementary to the target SYNGAP1 regRNA. For example, the ASO can comprise one, two, three, or four additional nucleotides at the 5′ end of any one of SEQ ID NOs: 10-4852 that are complementary to the human SYNGAP1 regRNA (e.g., any one of the regRNAs described in Table 1, including RR86_v1 (SEQ ID NO: 1), RR87 (SEQ ID NO: 2), RR88 (SEQ ID NO: 3), RR93_v1 (SEQ ID NO: 4), RR86_v2 (SEQ ID NO: 5), RR93_v1 (SEQ ID NO: 6) or the mouse SYNGAP1 regRNA (e.g., the regRNA described in Table 1 as RR121 (SEQ ID NO: 7)). In some embodiments, if the ASO includes up to four (e.g., 1, 2, 3, or 4) additional nucleotides at the 5′ end of the nucleotide sequence any one of SEQ ID NOs: 10-4852 that are complementary to the target SYNGAP1 regRNA, the ASO also can exclude up to four (e.g., 1, 2, 3 or 4) nucleotides from the 3′ end of the nucleotide sequence of any one of SEQ ID NOs: 10-4852. For example, the ASO can exclude one, two, three, or four 3′ end nucleotides from the nucleotide sequence of any one of SEQ ID NOs: 10-4852 if it includes one, two, three or four 5′ nucleotides that are complementary to the target SYNGAP1 regRNA.

[0096] In some aspects, an ASO provided herein comprises the nucleotide sequence of any one of SEQ ID NOs: 10-4852, plus up to four additional nucleotides at the 3′ end of said nucleotide sequence that are complementary to the target SYNGAP1 regRNA. For example, the ASO can comprise one, two, three, or four additional nucleotides at the 3′ end of any one of SEQ ID NOs: 10-4852 that are complementary to the target SYNGAP1 regRNA (e.g., any one of the regRNAs described in Table 1, including RR86_v1 (SEQ ID NO: 1), RR87 (SEQ ID NO: 2), RR88 (SEQ ID NO: 3), RR93_v1 (SEQ ID NO: 4), RR86_v2 (SEQ ID NO:5) or RR93_v1 (SEQ ID NO: 6). In some embodiments, if the ASO includes up to four (e.g., 1, 2, 3, or 4) additional nucleotides at the 3′ end of the nucleotide sequence of any one of SEQ ID NOs: 10-4852 that are complementary to the target SYNGAP1 regRNA, the ASO also can exclude up to four (e.g., 1, 2, 3, or 4) nucleotides from the 5′ end of the nucleotide sequence any one of SEQ ID NOs: 10-4852. For example, the ASO can exclude one, two, three, or four 5′ end nucleotides from the nucleotide sequence of any one of SEQ ID NOs: 10-4852 if it includes one, two, three or four 3′ nucleotides that are complementary to the target SYNGAP1 regRNA.

[0097] In some embodiments, the regulatory RNA has a nucleotide sequence of SEQ ID NO: 1, and the ASO comprises a nucleotide sequence selected from the group consisting of SEQ ID NOs: 10-59, 220-250, 261-267, 272-278, 526-528, 542-591, 702-728, 729-735-741, 988-990, and 1004-2961.

[0098] In some embodiments, the regulatory RNA has a nucleotide sequence of SEQ ID NO: 1, and the ASO comprises a nucleotide sequence selected from the group consisting of SEQ ID NOs: 14-59, 220-250, 261-267, 272-278, 526-528, 542-591, 702-728, 729-735-741, 988-990, and 1007-2961. In some embodiments, the regulatory RNA has a nucleotide sequence comprising nucleotides 185-467 of SEQ ID NO: 1, and the ASO comprises a nucleotide sequence selected from the group consisting of SEQ ID NOs: 14-59, 220-250, 261-267, 272-278, 526-528, 542-591, 702-728, 729-735-741, 988-990, and 1007-2961. In some embodiments, the regulatory RNA does not comprise or consist of a nucleotide sequence comprising nucleotides 1-184 of SEQ ID NO: 1, and the ASO comprises a nucleotide sequence selected from the group consisting of SEQ ID NOs: 14-59, 220-250, 261-267, 272-278, 526-528, 542-591, 702-728, 729-735-741, 988-990, and 1007-2961.

[0099] In some embodiments, the regulatory RNA has a nucleotide sequence of SEQ ID NO: 5, and the ASO comprises a nucleotide sequence selected from the group consisting of SEQ ID NOs: 14-59, 220-250, 261-267, 272-278, 526-528, 542-591, 702-728, 729-735-741, 988-990, and 1007-2961.

[0100] In some embodiments, the regulatory RNA has a nucleotide sequence of SEQ ID NO: 2, and the ASO comprises a nucleotide sequence selected from the group consisting of SEQ ID NOs: 60-73.

[0101] In some embodiments, the regulatory RNA has a nucleotide sequence of SEQ ID NO: 3, and the ASO comprises a nucleotide sequence selected from the group consisting of SEQ ID NOs: 74-109, 251-260, 268-271, and 279.

[0102] In some embodiments, the regulatory RNA has a nucleotide sequence of SEQ ID NO: 4 or 6, and the ASO comprises a nucleotide sequence selected from the group consisting of SEQ ID NOs: 110-219, 280-525, 529-541, 592-701, 742-987, and 991-1003.

[0103] In some embodiments, the regulatory RNA has a nucleotide sequence of SEQ ID NO: 7, and the ASO comprises a nucleotide sequence selected from the group consisting of SEQ ID NOs: 430-444 and 892-905.

### Hybridization and ΔG

[0104] The term “hybridizing” or “hybridizes” as used herein is to be understood as two nucleic acid strands (e.g., an oligonucleotide and a target nucleic acid) forming hydrogen bonds between base pairs on opposite strands thereby forming a duplex. The affinity of the binding between two nucleic acid strands is the strength of the hybridization. It is often described in terms of the melting temperature (Tₘ) defined as the temperature at which half of the oligonucleotides are duplexed with the target nucleic acid. At physiological conditions Tₘ, is not strictly proportional to the affinity (Mergny and Lacroix, 2003, Oligonucleotides 13:515-537). The standard state Gibbs free energy ΔG° is a more accurate representation of binding affinity and is related to the dissociation constant (K_{d}) of the reaction by ΔG°=−RTIn(K_{d}), where R is the gas constant and T is the absolute temperature. Therefore, a very low ΔG° of the reaction between an oligonucleotide and the target nucleic acid reflects a strong hybridization between the oligonucleotide and target nucleic acid. ΔG° is the free energy associated with a reaction where aqueous concentrations are 1M, the pH is 7, and the temperature is 37° C. The hybridization of oligonucleotides to a target nucleic acid is a spontaneous reaction and for spontaneous reactions ΔG° is less than zero. ΔG° can be measured experimentally, for example, by use of the isothermal titration calorimetry (ITC) method as described in Hansen et al., 1965, Chem, Comm. 36-38 and Holdgate et al., 2005, Drug Discov Today. The skilled person will know that commercial equipment is available for ΔG° measurements. ΔG° can also be estimated numerically by using the nearest neighbor model as described by SantaLucia, 1998, Proc Natl Aced Sci USA. 95: 1460-1465 using appropriately derived thermodynamic parameters described by Sugimoto et al., 1995, Biochemistry 34:11211-11216 and McTigue et al., 2004, Biochemistry 43:5388-5405. To have the possibility of modulating its intended nucleic acid target by hybridization, oligonucleotides of the present disclosure hybridize to a target nucleic acid with estimated ΔG° values below −10 kcal/mol for oligonucleotides that are 10-30 nucleotides in length. In some embodiments the degree or strength of hybridization is measured by the standard state Gibbs free energy ΔG°. The oligonucleotides may hybridize to a target nucleic acid with estimated ΔG° values below the range of −10 kcal/mol, such as below −15 kcal/mol, such as below −20 kcal/mol and such as below −25 kcal/mol for oligonucleotides that are 8-30 nucleotides in length. In some embodiments the oligonucleotides hybridize to a target nucleic acid with an estimated ΔG° value of −10 to −60 kcal/mol, such as −12 to −40 kcal/mol, −15 to −30 kcal/mol, −16 to −27 kcal/mol, or −18 to −25 kcal/mol.

### Duplex Region

[0105] The phrase “duplex region” refers to the region in two complementary or substantially complementary polynucleotides that form base pairs with one another, either by Watson-Crick base pairing or any other manner that allows for a stabilized duplex between polynucleotide strands that are complementary or substantially complementary. For example, a polynucleotide strand having 21 nucleotide units can base pair with another polynucleotide of 21 nucleotide units, yet only 19 bases on each strand are complementary or substantially complementary, such that the “duplex region” has 19 base pairs. The remaining bases may, for example, exist as 5′ and 3′ overhangs. Further, within the duplex region, 100% complementarity is not required; substantial complementarity is allowable within a duplex region. Substantial complementarity refers to 70% or greater complementarity. For example, a mismatch in a duplex region consisting of 19 base pairs results in 94.7% complementarity, rendering the duplex region substantially complementary. Duplex regions can be formed by two separate oligonucleotide strands, as well as by single oligonucleotide strands that can form hairpin structures comprising a duplex region.

[0106] A dsRNA includes two RNA strands that are complementary and hybridize to form a duplex structure under conditions in which the dsRNA will be used. One strand of a dsRNA (the antisense strand) includes a region of complementarity that is substantially complementary, and generally fully complementary, to a target sequence. The target sequence can be derived from the sequence of a SYNGAP1 regRNA, such as an eRNA or paRNA. The other strand (the sense strand) includes a region that is complementary to the antisense strand, such that the two strands hybridize and form a duplex structure when combined under suitable conditions. As described elsewhere herein and as known in the art, the complementary sequences of a dsRNA can also be contained as self-complementary regions of a single nucleic acid molecule, as opposed to being on separate oligonucleotides. Generally, the duplex structure is between 5 and 50 base pairs in length, e.g., between 5-50, 5-49, 5-48, 5-47, 5-46, 5-45, 5-44, 5-43, 5-42, 5-41, 5-40, 5-39, 5-38, 5-37, 5-36, 5-35, 5-34, 5-33, 5-32, 5-31, 5-30, 5-29, 5-28, 5-27, 5-26, 5-25, 5-24, 5-23, 5-22, 5-21, 5-20, 5-19, 5-18, 5-17, 5-16, 5-15, 5-14, 5-13, 5-12, 5-11, 5-10, 5-9, 5-8, 5-7, 5-6, 6-50, 6-49, 6-48, 6-47, 6-46, 6-45, 6-44, 6-43, 6-42, 6-41, 6-40, 6-39, 6-38, 6-37, 6-36, 6-35, 6-34, 6-33, 6-32, 6-31, 6-30, 6-29, 6-28, 6-27, 6-26, 6-25, 6-24, 6-23, 6-22, 6-21, 6-20, 6-19, 6-18, 6-17, 6-16, 6-15, 6-14, 6-13, 6-12, 6-11, 6-10, 6-9, 6-8, 6-7, 8-50, 8-49, 8-48, 8-47, 8-46, 8-45, 8-44, 8-43, 8-42, 8-41, 8-40, 8-39, 8-38, 8-37, 8-36, 8-35, 8-34, 8-33, 8-32, 8-31, 8-30, 8-29, 8-28, 8-27, 8-26, 8-25, 8-24, 8-23, 8-22, 8-21, 8-20, 8-19, 8-18, 8-17, 8-16, 8-15, 8-14, 8-13, 8-12, 8-11, 8-10, 8-9, 10-50, 10-49, 10-48, 10-47, 10-46, 10-45, 10-44, 10-43, 10-42, 10-41, 10-40, 10-39, 10-38, 10-37, 10-36, 10-35, 10-34, 10-33, 10-32, 10-31, 10-30, 10-29, 10-28, 10-27, 10-26, 10-25, 10-24, 10-23, 10-22, 10-21, 10-20, 10-19, 10-18, 10-17, 10-16, 10-15, 10-14, 10-13, 10-12, 10-11, 10-10, 10-9, 12-50, 12-49, 12-48, 12-47, 12-46, 12-45, 12-44, 12-43, 12-42, 12-41, 12-40, 12-39, 12-38, 12-37, 12-36, 12-35, 12-34, 12-33, 12-32, 12-31, 12-30, 12-29, 12-28, 12-27, 12-26, 12-25, 12-24, 12-23, 12-22, 12-21, 12-20, 12-19, 12-18, 12-17, 12-16, 12-15, 12-14, 12-1315-50, 15-49, 15-48, 15-47, 15-46, 15-45, 15-44, 15-43, 15-42, 15-41, 15-40, 15-39, 15-38, 15-37, 15-36, 15-35, 15-34, 15-33, 15-32, 15-31, 15-30, 15-29, 15-28, 15-27, 15-26, 15-25, 15-24, 15-23, 15-22, 15-21, 15-20, 15-19, 15-18, 15-17, 18-50, 18-49, 18-48, 18-47, 18-46, 18-45, 18-44, 18-43, 18-42, 18-41, 18-40, 18-39, 18-38, 18-37, 18-36, 18-35, 18-34, 18-33, 18-32, 18-31, 18-30, 18-30, 18-29, 18-28, 18-27, 18-26, 18-25, 18-24, 18-23, 18-22, 18-21, 18-20, 19-50, 19-49, 19-48, 19-47, 19-46, 19-45, 19-44, 19-43, 19-42, 19-41, 19-40, 19-39, 19-38, 19-37, 19-36, 19-35, 19-34, 19-33, 19-32, 19-31, 19-30, 19-30, 19-29, 19-28, 19-27, 19-26, 19-25, 19-24, 19-23, 19-22, 19-21, 19-20, 20-50, 20-49, 20-48, 20-47, 20-46, 20-45, 20-44, 20-43, 20-42, 20-41, 20-40, 20-39, 20-38, 20-37, 20-36, 20-35, 20-34, 20-33, 20-32, 20-31, 20-30, 20-30, 20-29, 20-28, 20-27, 20-26, 20-25, 20-24, 20-23, 20-22, 20-21, 21-50, 21-49, 21-48, 21-47, 21-46, 21-45, 21-44, 21-43, 21-42, 21-41, 21-40, 21-39, 21-38, 21-37, 21-36, 21-35, 21-34, 21-33, 21-32, 21-31, 21-30, 21-29, 21-28, 21-27, 21-26, 21-25, 21-24, 21-23, 21-22, 22-50, 22-49, 22-48, 22-47, 22-46, 22-45, 22-44, 22-43, 22-42, 22-41, 22-40, 22-39, 22-38, 22-37, 22-36, 22-35, 22-34, 22-33, 22-32, 22-31, 22-30, 22-29, 22-28, 22-27, 22-26, 22-25, 22-24, 22-23, 23-50, 23-49, 23-48, 23-47, 23-46, 23-45, 23-44, 23-43, 23-42, 23-41, 23-40, 23-39, 23-38, 23-37, 23-36, 23-35, 23-34, 23-33, 23-32, 23-31, 23-30, 23-29, 23-28, 23-27, 23-26, 23-25, or 23-24 base pairs in length. Ranges and lengths intermediate to the above recited ranges and lengths are also contemplated to be part of the disclosure.

[0107] Similarly, the region of complementarity to the target sequence can be between 5 and 50 nucleotides in length, e.g., between 5-50, 5-49, 5-48, 5-47, 5-46, 5-45, 5-44, 5-43, 5-42, 5-41, 5-40, 5-39, 5-38, 5-37, 5-36, 5-35, 5-34, 5-33, 5-32, 5-31, 5-30, 5-29, 5-28, 5-27, 5-26, 5-25, 5-24, 5-23, 5-22, 5-21, 5-20, 5-19, 5-18, 5-17, 5-16, 5-15, 5-14, 5-13, 5-12, 5-11, 5-10, 5-9, 5-8, 5-7, 5-6, 6-50, 6-49, 6-48, 6-47, 6-46, 6-45, 6-44, 6-43, 6-42, 6-41, 6-40, 6-39, 6-38, 6-37, 6-36, 6-35, 6-34, 6-33, 6-32, 6-31, 6-30, 6-29, 6-28, 6-27, 6-26, 6-25, 6-24, 6-23, 6-22, 6-21, 6-20, 6-19, 6-18, 6-17, 6-16, 6-15, 6-14, 6-13, 6-12, 6-11, 6-10, 6-9, 6-8, 6-7, 8-50, 8-49, 8-48, 8-47, 8-46, 8-45, 8-44, 8-43, 8-42, 8-41, 8-40, 8-39, 8-38, 8-37, 8-36, 8-35, 8-34, 8-33, 8-32, 8-31, 8-30, 8-29, 8-28, 8-27, 8-26, 8-25, 8-24, 8-23, 8-22, 8-21, 8-20, 8-19, 8-18, 8-17, 8-16, 8-15, 8-14, 8-13, 8-12, 8-11, 8-10, 8-9, 10-50, 10-49, 10-48, 10-47, 10-46, 10-45, 10-44, 10-43, 10-42, 10-41, 10-40, 10-39, 10-38, 10-37, 10-36, 10-35, 10-34, 10-33, 10-32, 10-31, 10-30, 10-29, 10-28, 10-27, 10-26, 10-25, 10-24, 10-23, 10-22, 10-21, 10-20, 10-19, 10-18, 10-17, 10-16, 10-15, 10-14, 10-13, 10-12, 10-11, 10-10, 10-9, 12-50, 12-49, 12-48, 12-47, 12-46, 12-45, 12-44, 12-43, 12-42, 12-41, 12-40, 12-39, 12-38, 12-37, 12-36, 12-35, 12-34, 12-33, 12-32, 12-31, 12-30, 12-29, 12-28, 12-27, 12-26, 12-25, 12-24, 12-23, 12-22, 12-21, 12-20, 12-19, 12-18, 12-17, 12-16, 12-15, 12-14, 12-13, 15-50, 15-49, 15-48, 15-47, 15-46, 15-45, 15-44, 15-43, 15-42, 15-41, 15-40, 15-39, 15-38, 15-37, 15-36, 15-35, 15-34, 15-33, 15-32, 15-31, 15-30, 15-29, 15-28, 15-27, 15-26, 15-25, 15-24, 15-23, 15-22, 15-21, 15-20, 15-19, 15-18, 15-17, 18-50, 18-49, 18-48, 18-47, 18-46, 18-45, 18-44, 18-43, 18-42, 18-41, 18-40, 18-39, 18-38, 18-37, 18-36, 18-35, 18-34, 18-33, 18-32, 18-31, 18-30, 18-30, 18-29, 18-28, 18-27, 18-26, 18-25, 18-24, 18-23, 18-22, 18-21, 18-20, 19-50, 19-49, 19-48, 19-47, 19-46, 19-45, 19-44, 19-43, 19-42, 19-41, 19-40, 19-39, 19-38, 19-37, 19-36, 19-35, 19-34, 19-33, 19-32, 19-31, 19-30, 19-30, 19-29, 19-28, 19-27, 19-26, 19-25, 19-24, 19-23, 19-22, 19-21, 19-20, 20-50, 20-49, 20-48, 20-47, 20-46, 20-45, 20-44, 20-43, 20-42, 20-41, 20-40, 20-39, 20-38, 20-37, 20-36, 20-35, 20-34, 20-33, 20-32, 20-31, 20-30, 20-30, 20-29, 20-28, 20-27, 20-26, 20-25, 20-24, 20-23, 20-22, 20-21, 21-50, 21-49, 21-48, 21-47, 21-46, 21-45, 21-44, 21-43, 21-42, 21-41, 21-40, 21-39, 21-38, 21-37, 21-36, 21-35, 21-34, 21-33, 21-32, 21-31, 21-30, 21-29, 21-28, 21-27, 21-26, 21-25, 21-24, 21-23, 21-22, 22-50, 22-49, 22-48, 22-47, 22-46, 22-45, 22-44, 22-43, 22-42, 22-41, 22-40, 22-39, 22-38, 22-37, 22-36, 22-35, 22-34, 22-33, 22-32, 22-31, 22-30, 22-29, 22-28, 22-27, 22-26, 22-25, 22-24, 22-23, 23-50, 23-49, 23-48, 23-47, 23-46, 23-45, 23-44, 23-43, 23-42, 23-41, 23-40, 23-39, 23-38, 23-37, 23-36, 23-35, 23-34, 23-33, 23-32, 23-31, 23-30, 23-29, 23-28, 23-27, 23-26, 23-25, or 23-24 nucleotides in length. Ranges and lengths intermediate to the above recited ranges and lengths are also contemplated to be part of the disclosure.

### Chemical Modifications of ASOs

[0108] In certain embodiments, the ASO does not consist of only DNA. In certain embodiments, the ASO comprises at least one chemical modification relative to a natural nucleotide (e.g., ribonucleotide, e.g., 2′-deoxy-2′-ribonucleotide). Various chemical modifications can be included in the ASOs of the present disclosure. The modifications can include one or more modifications in a sugar group (e.g., ribose) group, one or more modifications in a phosphate group, one or more modifications in a nucleobase, one or more terminal modifications, or a combination thereof. In some embodiments, an exemplary ASO comprising or consisting of a nucleotide sequence targeting a regRNA as shown in any one of Tables 2-4 is chemically modified. Such modifications can be, but are not limited to, 2′-O-(2-methoxyethyl) (2′-MOE), locked nucleic acid (LNA), 5-methyl on the cytidine, constrained ethyl (cET), phosphorothioate (PS) linkage, and/or a phosphodiester (PO) linkage, or any combination thereof. Chemical modifications of RNA are known in the art and described in, for example, PCT Application Publication No. WO2013/177248, incorporated herein by reference. In certain embodiments, each cytidine in an ASO provided herein is modified by 5-methyl.

[0109] Various chemical modifications for use with ASOs of the present disclosure include, but are not limited to: 3′-terminal deoxy-thymine (dT) nucleotides, 2′-O-methyl modified nucleotides, 2′-fluoro modified nucleotides, 2′-deoxy-modified nucleotides, locked nucleotides, unlocked nucleotides, conformationally restricted nucleotides, constrained ethyl nucleotides, abasic nucleotides, 2′-amino-modified nucleotides, 2′-O-allyl-modified nucleotides, 2′-C-alkyl-modified nucleotides, 2′-hydroxyl-modified nucleotides, 2′-methoxyethyl modified nucleotides, 2′-O-alkyl-modified nucleotides, morpholino nucleotides, phosphoramidates, non-natural base comprising nucleotides, tetrahydropyran modified nucleotides, 1,5-anhydrohexitol modified nucleotides, cyclohexenyl modified nucleotides, nucleotides comprising a phosphorothioate group, nucleotides comprising a methylphosphonate group, nucleotides comprising a 5′-phosphate, and nucleotides comprising a 5′-phosphate mimic.

[0110] In certain embodiments, the ASO comprises an RNA polynucleotide chemically modified to be resistant to one or more nucleases (e.g., nuclear RNases (e.g., the exosome complex or RNaseH)). In some embodiments, all nucleotide bases are modified in the ASO. In certain embodiments, the chemical modifications comprises β-D-ribonucleotides, 2-modified nucleotides (e.g., 2′-O-(2-Methoxyethyl) (2′-MOE), 2′-O—CH₃, or 2′-fluoro-arabino (FANA)), bicyclic sugar modified nucleotides (e.g., having a constrained ethyl or locked nucleic acid (LNA)), and/or one or more modified internucleotide bonds (e.g., phosphorothioate internucleotide linkage). In certain embodiments, the chemical modification comprises 2′-MOE and a phosphorothioate internucleotide bond. In certain embodiments, at least 8, 9, 10, 11, 12, 13, 14, 15, 16, 17, 18, 19, 20, or more consecutive nucleotides of the ASO are modified by 2′-MOE. In certain embodiments, each nucleotide of the ASO is modified by 2′-MOE. In certain embodiments, at least 7, 8, 9, 10, 11, 12, 13, 14, 15, 16, 17, 18, 19, 20, or more consecutive internucleotide bonds of the ASO are phosphorothioate internucleotide bonds. In certain embodiments, each internucleotide bond of the ASO is a phosphorothioate internucleotide bond.

[0111] Internucleotide linkage modifications that can be used with the ASOs of the present disclosure include, but are not limited to, phosphorothioate “PS” (P(S)), phosphoramidate (P(NR₁R₂) such as dimethylaminophosphoramidate(P(N(CH₃)₂)), phosphonocarboxylate (P(CH₂)ₙCOOR) such as phosphonoacetate “PACE” (P(CH₂COO⁻)), thiophosphonocarboxylate ((S)P(CH₂)nCOOR) such as thiophosphonoacetate “thioPACE” ((S)P(CH₂COO⁻)), alkylphosphonate (P(C₁₋₃alkyl) such as methylphosphonate —P(CH₃), boranophosphonate (P(BH₃)), and phosphorodithioate (P(S)₂).

[0112] In some embodiments, an ASO provided herein comprises at least 1, 2, 3, 4, 5, 6, 7, 8, 9, 10, 11, 12, 13, 14, 15, 16, 17, 18, 19, 20, 21, 22, 23, 24, 25, 26, 27, 28, 29, 30, 31, 32, 33, 34, 35, 36, 37, 38, 39, 40, 41, 42, 43, 44, 45, 46, 47, 48, 49, 50, or more PO bonds. In some embodiments, all internucleotide bonds of an ASO provided herein are PO internucleotide bonds. In some embodiments, an ASO provided herein does not comprise PO internucleotide bonds. In some embodiments, an ASO provided herein comprises at least 1, 2, 3, 4, 5, 6, 7, 8, 9, 10, 11, 12, 13, 14, 15, 16, 17, 18, 19, 20, 21, 22, 23, 24, 25, 26, 27, 28, 29, 30, 31, 32, 33, 34, 35, 36, 37, 38, 39, 40, 41, 42, 43, 44, 45, 46, 47, 48, 49, 50, or more PS internucleotide bonds. In some embodiments, all internucleotide bonds of an ASO provided herein are PS bonds. In some embodiments, an ASO provided herein does not comprise PS internucleotide bonds.

[0113] In some embodiments, an ASO provided herein comprises at least 1, 2, 3, 4, 5, 6, 7, 8, 9, 10, 11, 12, 13, 14, 15, 16, 17, 18, 19, 20, 21, 22, 23, 24, 25, 26, 27, 28, 29, 30, 31, 32, 33, 34, 35, 36, 37, 38, 39, 40, 41, 42, 43, 44, 45, 46, 47, 48, 49, 50, or more PS bonds. In some embodiments, all internucleotide bonds of an ASO provided herein are PS internucleotide bonds. In some embodiments, an ASO provided herein does not comprise PS internucleotide bonds. In some embodiments, an ASO provided herein comprises at least 1, 2, 3, 4, 5, 6, 7, 8, 9, 10, 11, 12, 13, 14, 15, 16, 17, 18, 19, 20, 21, 22, 23, 24, 25, 26, 27, 28, 29, 30, 31, 32, 33, 34, 35, 36, 37, 38, 39, 40, 41, 42, 43, 44, 45, 46, 47, 48, 49, 50, or more PS internucleotide bonds. In some embodiments, all internucleotide bonds of an ASO provided herein are PO bonds. In some embodiments, an ASO provided herein does not comprise PO internucleotide bonds.

[0114] In certain embodiments, the ASO comprises one or more chemical modifications at the 5′ end, the 3′ end, or both. Without wishing to be bound by theory, chemical modifications at one or both termini of a polynucleotide (e.g., polyribonucleotide) may stabilize the polynucleotide. In certain embodiments, the ASO comprises one or more chemical modifications in at least 1, 2, 3, 4, or 5 nucleotides at the 5′ end of the ASO. In certain embodiments, the ASO comprises one or more chemical modifications in at least 1, 2, 3, 4, or 5 nucleotides at the 3′ end of the ASO. In certain embodiments, the ASO comprises one or more chemical modifications in at least 1, 2, 3, 4, or 5 nucleotides at the 5′ end of the ASO and one or more chemical modifications in at least 1, 2, 3, 4, or 5 nucleotides at the 3′ end of the ASO.

[0115] The chemical structures can also be described in writing. In such cases, ‘M’ indicates MOE; ‘d’ indicates DNA, ‘L’ indicates LNA, “m” indicates 2′ OMethyl, ‘═’ indicates a phosphorothioate (PS) linkage, ‘—’ indicates a phosphodiester (PO) linkage; ‘*’ or ‘5C’ indicates 5-MethylCytosine, ‘ag’ indicates GalNAc, ‘tg’ or ‘teg’ indicates Teg-GalNAc, and ‘\hat{ }’ indicates FANA, “BioTeg” indicates Biotin; “Palm” indicates Palmitic acid; and “C18” indicates a Spacer 18 moiety.

[0116] To avoid ambiguity, this LNA has the formula:

[chemical structure]

wherein B is the particular designated base.

[0117] Exemplary visual representation of ASOs with chemical modifications are provided in FIG. 2. Additional exemplary ASOs with chemical modifications are provided in Table 2. In some embodiments, an ASO provided herein comprises a nucleotide sequence and/or a chemical modification any one of the ASOs provided in Tables 2-4.

[0118] In some embodiments, an ASO comprises a sequence selected from the group consisting of SEQ ID NOs: 10-4852. In some embodiments, an ASO comprises a sequence and chemical modification selected from the group consisting of SEQ ID NOs: 542-1003.

[0119] In some embodiments, an ASO provided herein comprises a nucleotide sequence of any one of the ASOs provided in Tables 2-4. In some embodiments, the ASO comprises a sequence and/or chemical modification selected from the group consisting of SEQ ID NOs: 10-4852. In some embodiments, the ASO comprising a sequence selected from the group consisting of SEQ ID NOs: 10-541 or 1004-4852 further comprises any chemical modification as disclosed herein.

### High Affinity Modified Nucleotides

[0120] A high affinity modified nucleotide is a modified nucleotide which, when incorporated into the oligonucleotide enhances the affinity of the oligonucleotide for its complementary target, for example as measured by the melting temperature (Tm). A high affinity modified nucleotide of the present disclosure preferably result in an increase in melting temperature between +0.5 to +12° C., such as between +1.5 to +10° C. or +3 to +8° C. per modified nucleotide. Numerous high affinity modified nucleotides are known in the art and include for example, many 2′ substituted nucleotides as well as locked nucleic acids (LNA) (see e.g. Freier & Altmann (1997) Nucl. Acid Res., 25, 4429-4443 and Uhlmann (2000) Curr. Opinion in Drug Development, 3(2), 293-213), each of which are hereby incorporated by reference.

### Sugar Modifications

[0121] The ASOs described herein may comprise one or more nucleotides which have a modified sugar moiety, i.e. a modification of the sugar moiety when compared to the ribose sugar moiety found in DNA and RNA. Numerous nucleotides with modification of the ribose sugar moiety have been made, primarily with the aim of improving certain properties of oligonucleotides, such as affinity and/or nuclease resistance. Such modifications include those where the ribose ring structure is modified, e.g. by replacement with a hexose ring (HNA), or a bicyclic ring, which typically have a biradical bridge between the C2 and C4 carbons on the ribose ring (LNA), or an unlinked ribose ring which typically lacks a bond between the C2 and C3 carbons (e.g. UNA). Other sugar modified nucleotides include, for example, bicyclohexose nucleic acids (WO2011/017521) or tricyclic nucleic acids (WO2013/154798), both of which are hereby incorporated by reference. Modified nucleotides also include nucleotides where the sugar moiety is replaced with a non-sugar moiety, for example in the case of peptide nucleic acids (PNA), or morpholino nucleic acids.

[0122] Sugar modifications also include modifications made via altering the substituent groups on the ribose ring to groups other than hydrogen, or the 2′—OH group naturally found in RNA nucleotides. Substituents may, for example be introduced at the 2′, 3′, 4′ or 5′ positions.

[0123] In some embodiments, oligonucleotides comprise modified sugar moieties, such as any one of a 2′-O-methyl (2′OMe) moeity, a 2′-O-methoxyethyl moeity, a bicyclic sugar moeity, PNA (e.g., an oligonucleotide comprising one or more N-(2-aminoethyl)-glycine units linked by amide bonds or carbonyl methylene linkage as repeating units in place of a sugar-phosphate backbone), locked nucleotide (LNA) (e.g., an oligonucleotide comprising one or more locked ribose, and can be a mixture of 2′-deoxy nucleotides or 2′OMe nucleotides), cET (e.g., an oligonucleotide comprising one or more cET sugars), cMOE (e.g., an oligonucleotide comprising one or more cMOE sugar), morpholino oligomer (e.g., an oligonucleotide comprising a backbone comprising one or more phosphorodiamidate morpholiono oligomers), 2′-deoxy-2′-fluoro nucleotide (e.g., an oligonucleotide comprising one or more 2′-fluoro-β-D-arabinonucleotide), tcDNA (e.g., an oligonucleotide comprising one or more tcDNA modified sugar), constrained ethyl 2′-4′-bridged nucleic acid (cEt), S-cEt, ethylene bridged nucleic acid (ENA) (e.g., an oligonucleotide comprising one or more ENA modified sugar), hexitol nucleic acids (HNA) (e.g., an oligonucleotide comprising one or more HNA modified sugar), or tricyclic analog (tcDNA) (e.g., an oligonucleotide comprising one or more tcDNA modified sugar).

[0124] In some embodiments, oligonucleotides comprise nucleobase modifications selected from the group consisting of 2-thiouracil (“2-thioU”), 2-thiocytosine (“2-thioC”), 4-thiouracil (“4-thioU”), 6-thioguanine (“6-thioG”), 2-aminoadenine (“2-aminoA”), 2-aminopurine, pseudouracil, hypoxanthine, 7-deazaguanine, 7-deaza-8-azaguanine, 7-deazaadenine, 7-deaza-8-azaadenine, 5-methylcytosine (“5-methylC”), 5-methyluracil (“5-methylU”), 5-hydroxymethylcytosine, 5-hydroxymethyluracil, 5,6-dehydrouracil, 5-propynylcytosine, 5-propynyluracil, 5-ethynylcytosine, 5-ethynyluracil, 5-allyluracil (“5-allylU”), 5-allylcytosine (“5-allylC”), 5-aminoallyluracil (“5-aminoallylU”), 5-aminoallyl-cytosine (“5-aminoallylC”), an abasic nucleotide, Z base, P base, Unstructured Nucleic Acid (“UNA”), isoguanine (“isoG”), and isocytosine (“isoC”), glycerol nucleic acid (GNA), thiomorpholino (C4H9NS) or thiophosphoramidate morpholinos (TMOs). Synthesis of glycerol nucleic acid (GNA) (also known as glycol nucleic acids) is described in Zhang et al, (2010) Current Protocols in Nucleic Acid Chemistry 4.40.1-4.40.18, hereby incorporated by reference. Synthesis of thiophosphoramidate Morpholino Oligonucleotides is described in Langer et al, J. Am. Chem. Soc. 2020, 142(38): 16240-53.

### 2′ Sugar Modified Nucleotides

[0125] A 2′ sugar modified nucleotide is a nucleotide which has a substituent other than H or —OH at the 2′ position (2′ substituted nucleotide) or comprises a 2′ linked biradical capable of forming a bridge between the 2′ carbon and a second carbon in the ribose ring, such as LNA (2′-4′ biradical bridged) nucleotides.

[0126] Without wishing to be bound by theory, the 2′ modified sugar may provide enhanced binding affinity and/or increased nuclease resistance to the oligonucleotide. Examples of 2′ substituted modified nucleotides are 2′-O-alkyl-RNA, 2′-O-methyl-RNA, 2′-alkoxy-RNA, 2′-O-methoxyethyl-RNA (MOE), 2′-amino-DNA, 2′-Fluoro-RNA, and 2′-F-ANA nucleotide. For further examples, see e.g. Freier & Altmann (1997) Nucl. Acid Res., 25, 4429-4443 and Uhlmann (2000) Curr. Opinion in Drug Development, 3(2), 293-213, and Deleavey and Damha, Chemistry and Biology 2012, 19, 937, each of which are hereby incorporated by reference.

### Locked Nucleic Acid Nucleotides (LNA Nucleotide)

[0127] A “LNA nucleotide” is a 2′-sugar modified nucleotide which comprises a biradical linking the C2′ and C4′ of the ribose sugar ring of said nucleotide (also referred to as a “2′-4′ bridge”), which restricts or locks the conformation of the ribose ring. In other words, a locked nucleotide is a nucleotide comprising a bicyclic sugar moiety comprising a 4′-CH₂—O-2′ bridge. This structure effectively “locks” the ribose in the 3′-endo structural conformation. The addition of locked nucleotides to oligonucleotides has been shown to increase oligonucleotide stability in serum, and to reduce off-target effects (Grunweller, A. et al., (2003) Nucleic Acids Research 31(12):3185-3193). These nucleotides are also sometimes termed bridged nucleic acid or bicyclic nucleic acid (BNA). The locking of the conformation of the ribose is associated with an enhanced affinity of hybridization (duplex stabilization) when the LNA is incorporated into an oligonucleotide with complementarity to an RNA or DNA molecule. This can be routinely determined by measuring the melting temperature of the oligonucleotide/complement duplex. Exemplary LNA nucleotides include beta-D-oxy-LNA, 6′-methyl-beta-D-oxy LNA such as (S)-6′-methyl-beta-D-oxy-LNA (ScET) and ENA.

[0128] Examples of bicyclic nucleotides for use in the polynucleotides of the disclosure include without limitation nucleotides comprising a bridge between the 4′ and the 2′ ribosyl ring atoms. In certain embodiments, the polynucleotide agents of the disclosure include one or more bicyclic nucleotides comprising a 4′ to 2′ bridge. Examples of such 4′ to 2′ bridged bicyclic nucleotides, include but are not limited to 4′-(CH₂)—O-2′ (LNA); 4′-(CH₂)—S-2′; 4′-(CH₂)₂—O-2′ (ENA); 4′-CH(CH₃)—O-2′ (also referred to as “constrained ethyl” or “cEt”) and 4′-CH(CH₂OCH₃)—O-2′ (and analogs thereof, see, e.g., U.S. Pat. No. 7,399,845); 4′-C(CH₃)(CH₃)—O-2′ (and analogs thereof, see e.g., U.S. Pat. No. 8,278,283); 4′-CH₂—N(OCH3)-2′ (and analogs thereof; see e.g., U.S. Pat. No. 8,278,425); 4′-CH₂—O—N(CH₃)₂-2′ (see, e.g., U.S. Patent Publication No. 2004/0171570); 4′-CH₂—N(R)—O-2′, wherein R is H, C₁-C₁₂ alkyl, or a protecting group (see, e.g., U.S. Pat. No. 7,427,672); 4′-CH₂—C(H)(CH₃)-2′ (see, e.g., Chattopadhyaya et al., J. Org. Chem., 2009, 74, 118-134); and 4′-CH₂—C(═CH₂)-2′ (and analogs thereof, see, e.g., U.S. Pat. No. 8,278,426). The entire contents of each of the foregoing are hereby incorporated herein by reference.

[0129] Additional representative U.S. Patents and US Patent Publications that teach the preparation of locked nucleic acid nucleotides include, but are not limited to, the following: U.S. Pat. Nos. 6,268,490; 6,525,191; 6,670,461; 6,770,748; 6,794,499; 6,998,484; 7,053,207; 7,034,133; 7,084,125; 7,399,845; 7,427,672; 7,569,686; 7,741,457; 8,022,193; 8,030,467; 8,278,425; 8,278,426; 8,278,283; US 2008/0039618; and US 2009/0012281, the entire contents of each of which are hereby incorporated herein by reference.

[0130] Any of the foregoing bicyclic nucleotides can be prepared having one or more stereochemical sugar configurations including for example α-L-ribofuranose and 3-D-ribofuranose (see International Publication No. WO 99/14226, contents of which are incorporated by reference herein).

[0131] An oligonucleotide of the disclosure can also be modified to include one or more constrained ethyl nucleotides. As used herein, a “constrained ethyl nucleotide” or “cEt” is a locked nucleotide comprising a bicyclic sugar moiety comprising a 4′-CH(CH₃)—O-2′ bridge. In one embodiment, a constrained ethyl nucleotide is in the S conformation referred to herein as “S-cEt.”

[0132] An oligonucleotide of the disclosure may also include one or more “conformationally restricted nucleotides” (“CRN”). CRN are nucleotide analogs with a linker connecting the C2′ and C4′ carbons of ribose or the C3 and —C5′ carbons of ribose. CRN lock the ribose ring into a stable conformation and increase the hybridization affinity to an RNA (e.g., a regRNA or a mRNA). The linker is of sufficient length to place the oxygen in an optimal position for stability and affinity resulting in less ribose ring puckering.

[0133] Representative publications that teach the preparation of certain of the above noted CRN include, but are not limited to, US Patent Publication No. 2013/0190383; and PCT publication WO 2013/036868, the entire contents of each of which are hereby incorporated herein by reference.

[0134] In some embodiments, an oligonucleotide of the disclosure comprises one or more monomers that are UNA (unlocked nucleotide) nucleotides. UNA is unlocked acyclic nucleotide, wherein any of the bonds of the sugar has been removed, forming an unlocked “sugar” residue. In one example, UNA also encompasses monomer with bonds between C1′—C4′ have been removed (i.e., the covalent carbon-oxygen-carbon bond between the C1′ and C4′ carbons). In another example, the C2′—C3′ bond (i.e., the covalent carbon-carbon bond between the C2′ and C3′ carbons) of the sugar has been removed (see Nuc. Acids Symp. Series, 52, 133-134 (2008) and Fluiter et al., Mol. Biosyst., 2009, 10, 1039 hereby incorporated by reference).

[0135] Representative U.S. publications that teach the preparation of UNA include, but are not limited to, U.S. Pat. No. 8,314,227; and US Patent Publication Nos. 2013/0096289; 2013/0011922; and 2011/0313020, the entire contents of each of which are hereby incorporated herein by reference.

[0136] The ribose molecule may also be modified with a cyclopropane ring to produce a tricyclodeoxynucleic acid (tricyclo DNA). The ribose moiety may be substituted for another sugar such as 1,5,-anhydrohexitol, threose to produce a threose nucleotide (TNA), or arabinose to produce an arabino nucleotide. The ribose molecule can also be replaced with non-sugars such as cyclohexene to produce cyclohexene nucleotide or glycol to produce glycol nucleotides.

[0137] Potentially stabilizing modifications to the ends of nucleotide molecules can include N-(acetylaminocaproyl)-4-hydroxyprolinol (Hyp-C6-NHAc), N-(caproyl-4-hydroxyprolinol (Hyp-C6), N-(acetyl-4-hydroxyprolinol (Hyp-NHAc), thymidine-2′-O-deoxythymidine (ether), N-(aminocaproyl)-4-hydroxyprolinol (Hyp-C6-amino), 2-docosanoyl-uridine-3″-phosphate, inverted base dT(idT) and others. Disclosure of this modification can be found in PCT Publication No. WO 2011/005861.

[0138] Other alternatives chemistries of an oligonucleotide of the disclosure include a 5′ phosphate or 5′ phosphate mimic, e.g., a 5′-terminal phosphate or phosphate mimic of an oligonucleotide. Suitable phosphate mimics are disclosed in, for example US Patent Publication No. 2012/0157511, the entire contents of which are incorporated herein by reference.

[0139] Additional non-limiting, exemplary LNA nucleotides are disclosed in WO 99/014226, WO 00/66604, WO 98/039352, WO 2004/046160, WO 00/047599, WO 2007/134181, WO 2010/077578, WO 2010/036698, WO 2007/090071, WO 2009/006478, WO 2011/156202, WO 2008/154401, WO 2009/067647, WO 2008/150729, Morita et al., Bioorganic & Med. Chem. Lett. 12, 73-76, Seth et al. J. Org. Chem. 2010, Vol 75(5) pp. 1569-81, Mitsuoka et al., Nucleic Acids Research 2009, 37(4), 1225-1238, and Wan and Seth, J. Medical Chemistry 2016, 59, 9645-9667, each of which are hereby incorporated by reference.

[0140] In some embodiments, the length of the ASO is 5×n+5 nucleotides (n is an integer of 3 or greater), wherein the nucleotides at positions 5×m are ribonucleotides modified by LNA (m is an integer from 1 to n) and the nucleotides at the remaining positions are ribonucleotides modified by 2′-O-methoxyethyl.

[0141] In some embodiments, the nucleotide sugar modification is 2′-O C1-4alkyl such as 2′-O-methyl (2′-OMe), 2′-deoxy (2′-H), 2′-OC1-3alkyl-O-C1-3alkyl such as 2′-methoxyethyl (“2′-MOE”), 2′-fluoro (“2′-F”), 2′-amino (“2′-NH2”), 2′-arabinosyl (“2′-arabino”) nucleotide, 2′-F-arabinosyl (“2′-F-arabino”) nucleotide, 2′-locked nucleic acid (“LNA”) nucleotide, 2′-amido bridge nucleic acid (AmNA), 2′-unlocked nucleic acid (“ULNA”) nucleotide, a sugar in L form (“L-sugar”), or 4′-thioribosyl nucleotide.

### Mixmers and Gapmers

[0142] The ASO can have a mixmer and/or gapmer structure, for example, in a pattern disclosed by the ASOs in FIG. 2.

[0143] In certain embodiments, the ASO is a mixmer. As used herein, the term “mixmer” refers to an oligonucleotide comprising an alternating composition of DNA monomers and nucleotide analogue monomers across at least a portion of the oligonucleotide sequence. In certain embodiments, the ASO is a mixmer based on the gapmer structure, comprising a mixture of DNA nucleotides and 2′-MOE nucleotides in the gap, flanked by RNA sequences (e.g., 2′-modified RNA sequences) in the wings. Mixmers may be designed to comprise a mixture of affinity enhancing nucleotide analogues, such as in non-limiting example 2′-O-alkyl-RNA monomers, 2′-amino-DNA monomers, 2′-fluoro-DNA monomers, LNA monomers, arabino nucleic acid (ANA) monomers, 2′-fluoro-ANA monomers, HNA monomers, INA monomers, 2′-MOE-RNA (2′-O-methoxyethyl-RNA), 2′Fluoro-DNA, and LNA. In some embodiments, the mixmer is incapable of recruiting RNase H. In some embodiments, the mixmer comprises one type of affinity enhancing nucleotide analogue together with DNA and/or RNA.

[0144] Multiple different modifications can be interspaced in a mixmer. For example, the ASO can comprise LNA modification in a plurality of nucleotides and a different modification in some or all of the rest of the nucleotides. In some embodiments, any two adjacent LNA-modified nucleotides are separated by at least 1, 2, 3, 4, or 5 nucleotides. Throughout the ASO, the distance between adjacent LNA-modified nucleotides can either be constant (e.g., any two adjacent LNA-modified nucleotides are separated by 1, 2, 3, 4, or 5 nucleotides) or variable. In some embodiments, the length of the ASO is 3×n, 3×n−1, or 3×n−2 nucleotides (n is an integer of 6 or greater), wherein (a) (i) the nucleotides at positions 3×m−2 (m is an integer from 1 to n) are nucleotides (e.g., ribonucleotides or deoxyribonucleotides) comprising a first modification (e.g., LNA), (ii) the nucleotides at positions 3×m−1 (m is an integer from 1 to n) are nucleotides (e.g., ribonucleotides or deoxyribonucleotides) comprising a first modification (e.g., LNA), or (iii) the nucleotides at positions 3×m (m is an integer from 1 to n) are nucleotides (e.g., ribonucleotides or deoxyribonucleotides) comprising a first modification (e.g., LNA); and (b) the nucleotides at the remaining positions comprise a second, different modification (e.g., 2′-O-methoxyethyl). In some embodiments, the length of the ASO is 2×n or 2×n−1 nucleotides (n is an integer of 9 or greater), wherein (a) (i) the nucleotides at positions 2×m−1 (m is an integer from 1 to n) are nucleotides (e.g., ribonucleotides or deoxyribonucleotides) comprising a first modification (e.g., LNA), or (ii) the nucleotides at positions 2×m (m is an integer from 1 to n) are nucleotides (e.g., ribonucleotides or deoxyribonucleotides) comprising a first modification (e.g., LNA); and (b) the nucleotides at the remaining positions comprise a second, different modification (e.g., 2′-O-methoxyethyl). Similar modification patterns, for example, where the first modification is repeated very 4, 5, or more nucleotides, are also contemplated. In some embodiments, the length of the ASO is 4×n, 4×n−1, or 4×n−2 nucleotides (n is an integer of 6 or greater), wherein (a) (i) the nucleotides at positions 4×m−2 (m is an integer from 1 to n) are nucleotides (e.g., ribonucleotides or deoxyribonucleotides) comprising a first modification (e.g., LNA), (ii) the nucleotides at positions 4×m−1 (m is an integer from 1 to n) are nucleotides (e.g., ribonucleotides or deoxyribonucleotides) comprising a first modification (e.g., LNA), or (iii) the nucleotides at positions 3×m (m is an integer from 1 to n) are nucleotides (e.g., ribonucleotides or deoxyribonucleotides) comprising a first modification (e.g., LNA); and (b) the nucleotides at the remaining positions comprise a second, different modification (e.g., 2′-O-methoxyethyl). In some embodiments, the length of the ASO is 5×n, 5×n−1, or 5×n−2 nucleotides (n is an integer of 6 or greater), wherein (a) (i) the nucleotides at positions 5×m−2 (m is an integer from 1 to n) are nucleotides (e.g., ribonucleotides or deoxyribonucleotides) comprising a first modification (e.g., LNA), (ii) the nucleotides at positions 5×m−1 (m is an integer from 1 to n) are nucleotides (e.g., ribonucleotides or deoxyribonucleotides) comprising a first modification (e.g., LNA), or (iii) the nucleotides at positions 5×m (m is an integer from 1 to n) are nucleotides (e.g., ribonucleotides or deoxyribonucleotides) comprising a first modification (e.g., LNA); and (b) the nucleotides at the remaining positions comprise a second, different modification (e.g., 2′-O-methoxyethyl).

[0145] In some embodiments, the ASO further comprises a GalNAc or Teg-GalNAc moiety at the 5′ or 3′ end of the ASO.

[0146] In certain embodiments, the ASO comprises a DNA sequence (e.g., having at least 1, 2, 3, 4, 5, 6, 7, 8, 9, 10, 11, 12, 13, 14, or 15 contiguous nucleotides of unmodified DNA) flanked on both sides by RNA sequences. Such structure is known as “gapmer,” in which the DNA region is referred to as the “gap” and the RNA regions is referred to as the “wings” (see, e.g., PCT Application Publication No. WO2013/177248). Gapmers were known to facilitate degradation of the target RNA by recruiting nucleases (e.g., nuclear RNAses (e.g., RNase H)). Surprisingly, in some embodiments of the present disclosure, it has been discovered that a gapmer that binds to a regRNA having the same sequence as a parent ASO but having different chemical modifications, can also increase target gene expression. In certain embodiments, the ASO comprises a DNA sequence flanked by RNA sequences and does not induce RNAse- or RNAse H-mediated degradation.

[0147] In some embodiments, the ASO gapmer comprises an internal DNA region flanked by two external RNA “wings.” For example, the internal DNA gap can comprise at least 49, 48, 47, 46, 45, 44, 43, 42, 41, 40, 39, 38, 37, 36, 35, 34, 33, 32, 31, 30, 29, 28, 27, 26, 25, 24, 23, 22, 21, 20, 19, 18, 17, 16, 15, 14, 13, 12, 11, 10, 9, 8, 7, 6, 5, 4, 3, 2, or 1 nucleotide(s), while each of the external RNA wing(s) can independently comprise 1, 2, 3, 4, 5, 6, 7, 8, 9, 10, 11, 12, 13, 14, 15, 16, 17, 18, 19, 20, 21, 22, 23, 24, 25, 26, 27, 28, 29, 30, 31, 32, 33, 34, 35, 36, 37, 38, 39, 40, 41, 42, 43, 44, 45, 46, 47, 48, 49, 50 or more nucleotides. Exemplary gapmer structures include, but are not limited to a 1-10-9, 2-10-8, 3-10-7, 4-10-6, 6-10-4, 7-10-3, 8-10-2, 9-10-1, 1-18-1, 2-16-2, 3-14-3, 4-12-4, 5-10-5, 6-8-6, 7-6-7, 8-5-7, 7-5-8, 8-4-8, or 9-2-9 structure where the first and third number indicate the number of external RNA nucleotides and the second number indicates the number of internal DNA nucleotides.

[0148] The ASO can also be a mixmer comprising one DNA region linked to one RNA region. In some embodiments, the mixmer comprises at least 10 DNA nucleotides linked to at least 10 RNA nucleotides, wherein the DNA nucleotides are at the 5′ end of the mixmer or the 3′ end of the mixmer. In some embodiments, the mixmer comprises at least 1, 2, 3, 4, 5, 6, 7, 8, 9, 10, 11, 12, 13, 14, 15, 16, 17, 18, or 19 DNA nucleotide(s) linked to at least 49, 48, 47, 46, 45, 44, 43, 42, 41, 40, 39, 38, 37, 36, 35, 34, 33, 32, 31, 30, 29, 28, 27, 26, 25, 24, 23, 22, 21, 20, 19, 18, 17, 16, 15, 14, 13, 12, 11, 10, 9, 8, 7, 6, 5, 4, 3, 2, or 1 RNA nucleotide(s), wherein the DNA nucleotides are at the 5′ end of the mixmer or the 3′ end of the mixmer. In some embodiment, the RNA regions of the gapmer or mixmer can comprise any additional chemical modification as disclosed herein.

[0149] In certain embodiments, the ASO (e.g., the gapmer or mixmer) is about 8, 9, 10, 11, 12, 13, 14, 15, 16, 17, 18, 19, 20, 21, 22, 23, 24, 25, 26, 27, 28, 29, 30, 31, 32, 33, 34, 35, 36, 37, 38, 39, 40, 41, 42, 43, 44, 45, 46, 47, 48, 49, 50 or more nucleotides in length. In certain embodiments, the gap is about 1, 2, 3, 4, 5, 6, 7, 8, 9, 10, 11, 12, 13, 14, 15, 16, 17, 18, 19, or more nucleotides in length. In certain embodiments, one or both wings are about 2, 3, 4, 5, 6, 7, 8, 9, 10, 11, 12, 13, 14, 15, 16, 17, 18, or 19 or more nucleotides in length. In certain embodiments, one or both wings comprises RNA modifications, for example, 3-D-ribonucleotides, 2′-modified nucleotides (e.g., 2′-O-(2-Methoxyethyl) (2′-MOE), 2′-O—CH₃, or 2′-fluoro-arabino (FANA)), and bicyclic sugar modified nucleotides (e.g., having a constrained ethyl or locked nucleic acid (LNA)). In certain embodiments, each ribonucleotide in the mixmer or gapmer is modified by 2′-MOE. In certain embodiments, the mixmer or gapmer comprises one or more modified internucleotide bonds, e.g., phosphorothioate (PS) internucleotide linkage. In certain embodiments, each two adjacent nucleotides in the mixmer or gapmer are linked by a phosphorothioate internucleotide bond.

[0150] In certain embodiments, the ASO does not comprise 1 or more, 2 or more, 3 or more, 4 or more, 5 or more, 6 or more, 7 or more, 8 or more, 9 or more, 10 or more, 10 or more, 11 or more, 12 or more, 13 or more, 14 or more, 15 or more, 20 or more, 25 or more, 30 or more, 35 or more, 40 or more, or 45 or more contiguous nucleotides of unmodified DNA. In some embodiments, such a DNA sequence is disrupted by modified (e.g., 2′-MOE modified) ribonucleotides every 2, 3, 4, 5, or more nucleotides. In some embodiments, the ASO comprises only ribonucleotides and no deoxyribonucleotides.

[0151] The structural features of mixmer and gapmer can be combined. In certain embodiments, the ASO has a structure similar to that of a mixmer disclosed herein (e.g., one having interspaced modifications), except that the second modification in the gap is changed to a third modification (e.g., deoxyribonucleotide). In certain embodiments, the ASO has a structure similar to that of a gapmer disclosed herein, except that in the gap the nucleotides are modified in a mixmer pattern.

[0152] In certain embodiments, the ASO further comprises a ligand moiety, e.g., a ligand moiety that specifically targets a tissue or organ in a subject. For example, N-acetylgalactosamine (GalNAc) specifically targets liver. In certain embodiments, the ligand moiety comprises GalNAc. In certain embodiments, the ligand moiety comprises a three-cluster GalNAc moiety, commonly denoted GAlNAc3. Other types of GalNAc moieties are one-cluster, two cluster or four cluster GalNAc, denoted as GalNAc1, GalNAc2, or GalNAc4. In certain embodiments, the ligand moiety comprises GalNAc1, GalNAc2, GalNAc3, or GalNAc4.

[0153] In certain embodiments, the ligand moiety comprises biotin. In certain embodiments, the ligand moiety comprises palmitic acid. In certain embodiments, the ligand moiety comprises a Spacer 18 moiety (C18).

### III. Pharmaceutical Compositions

[0154] In certain embodiments, an ASOs disclosed herein can be present in pharmaceutical compositions. The pharmaceutical composition can be formulated for use in a variety of drug delivery systems. One or more pharmaceutically acceptable excipients or carriers can also be included in the composition for proper formulation. In some embodiments, the pharmaceutical acceptable carrier comprises sterile saline, sterile water, or phosphate buffered saline (PBS). Suitable formulations for use in the present disclosure are found in Remington's Pharmaceutical Sciences, Mack Publishing Company, Philadelphia, Pa., 17th ed., 1985. For a brief review of methods for drug delivery, see, e.g., Langer (Science 249:1527-1533, 1990).

[0155] Exemplary carriers and pharmaceutical formulations suitable for delivering nucleic acids are described in Durymanov and Reineke (2018) Front. Pharmacol. 9:971; Barba et al. (2019) Pharmaceutics 11(8): 360; Ni et al. (2019) Life (Basel) 9(3): 59, each of which is incorporated herein by reference. It is understood that the presence of a ligand moiety conjugated to the ASO may circumvent the need for a carrier for delivery to a tissue or organ targeted by the ligand moiety.

[0156] The delivery of an oligonucleotide of the disclosure to a cell e.g., a cell within a subject, such as a human subject e.g., a subject in need thereof, such as a subject having or at risk of developing a SYNGAP1 related disorder can be achieved in a number of different ways. For example, delivery may be performed by contacting a cell with an oligonucleotide of the disclosure either in vitro or in vivo. In vivo delivery may also be performed directly by administering a composition comprising an oligonucleotide to a subject. These alternatives are discussed further below.

[0157] In general, any method of delivering a nucleic acid molecule (in vitro or in vivo) can be adapted for use with an oligonucleotide of the disclosure (see e.g., Akhtar S. and Julian R L., (1992) Trends Cell. Biol. 2(5):139-144 and WO 94/02595, which are incorporated herein by reference in their entireties). For in vivo delivery, factors to consider in order to deliver an oligonucleotide molecule include, for example, biological stability of the delivered molecule, prevention of non-specific effects, and accumulation of the delivered molecule in the target tissue. The non-specific effects of an oligonucleotide can be minimized by local administration, for example, by direct injection or implantation into a tissue or topically administering the preparation. Local administration to a treatment site maximizes local concentration of the agent, limits the exposure of the agent to systemic tissues that can otherwise be harmed by the agent or that can degrade the agent, and permits a lower total dose of the oligonucleotide molecule to be administered.

[0158] For administering an oligonucleotide systemically for the treatment of a disease, the oligonucleotide can include alternative nucleobases, alternative sugar moieties, and/or alternative internucleotide linkages, or alternatively delivered using a drug delivery system; both methods act to prevent the rapid degradation of the oligonucleotide by endo- and exo-nucleases in vivo. Modification of the oligonucleotide or the pharmaceutical carrier can also permit targeting of the oligonucleotide composition to the target tissue and avoid undesirable off-target effects. Oligonucleotide molecules can be modified by chemical conjugation to lipophilic groups such as cholesterol to enhance cellular uptake and prevent degradation. In an alternative embodiment, the oligonucleotide can be delivered using drug delivery systems such as a nanoparticle, a lipid nanoparticle, a polyplex nanoparticle, a lipoplex nanoparticle, a dendrimer, a polymer, liposomes, or a cationic delivery system. Positively charged cationic delivery systems facilitate binding of an oligonucleotide molecule (negatively charged) and also enhance interactions at the negatively charged cell membrane to permit efficient uptake of an oligonucleotide by the cell. Cationic lipids, dendrimers, or polymers can either be bound to an oligonucleotide, or induced to form a vesicle or micelle that encases an oligonucleotide. The formation of vesicles or micelles further prevents degradation of the oligonucleotide when administered systemically. In general, any methods of delivery of nucleic acids known in the art may be adaptable to the delivery of the oligonucleotides of the disclosure. Methods for making and administering cationic oligonucleotide complexes are well within the abilities of one skilled in the art (see e.g., Sorensen, D R., et al. (2003) J. Mol. Biol 327:761-766; Verma, U N. et al., (2003) Clin. Cancer Res. 9:1291-1300; Arnold, A S et al., (2007) J. Hypertens. 25:197-205, which are incorporated herein by reference in their entirety). Some non-limiting examples of drug delivery systems useful for systemic delivery of oligonucleotides include DOTAP (Sorensen, D R., et al (2003), supra; Verma, U N. et al., (2003), supra), Oligofectamine, “solid nucleic acid lipid particles” (Zimmermann, T S. et al., (2006) Nature 441:111-114), cardiolipin (Chien, P Y. et al., (2005) Cancer Gene Ther. 12:321-328; Pal, A. et al., (2005) Int J. Oncol. 26:1087-1091), polyethyleneimine (Bonnet M E. et al., (2008) Pharm. Res. Aug 16 Epub ahead of print; Aigner, A. (2006) J. Biomed. Biotechnol. 71659), Arg-Gly-Asp (RGD) peptides (Liu, S. (2006) Mol. Pharm. 3:472-487), and polyamidoamines (Tomalia, D A. et al., (2007) Biochem. Soc. Trans. 35:61-67; Yoo, H. et al., (1999) Pharm. Res. 16:1799-1804). In some embodiments, an oligonucleotide forms a complex with cyclodextrin for systemic administration. Methods for administration and pharmaceutical compositions of oligonucleotides and cyclodextrins can be found in U.S. Pat. No. 7,427,605, which is herein incorporated by reference in its entirety. In some embodiments the oligonucleotides of the disclosure are delivered by polyplex or lipoplex nanoparticles. Methods for administration and pharmaceutical compositions of oligonucleotides and polyplex nanoparticles and lipoplex nanoparticles can be found in U.S. Patent Application Nos. 2017/0121454; 2016/0369269; 2016/0279256; 2016/0251478; 2016/0230189; 2015/0335764; 2015/0307554; 2015/0174549; 2014/0342003; 2014/0135376; and 2013/0317086, which are herein incorporated by reference in their entirety.

[0159] In some embodiments, the compounds described herein may be administered in combination with additional therapeutics (e.g., using a simultaneous or alternating regimen). Examples of additional therapeutics include an anti-epileptic agent such as quinidine and/or sodium channel blockers, an anti-convulsant, a cholinesterase inhibitor, a dopamine agonist, levodopa, a dopamine reuptake inhibitor (SSRI), a selective serotonin reuptake inhibitor (NRI), a norepinephrine-dopamine reuptake inhibitor (NDRI), a serotonin-norepinephrine-dopamine reuptake inhibitor (SNDRI). Additionally, the compounds described herein may be administered in combination with recommended lifestyle changes.

### Membranous Molecular Assembly Delivery Methods

[0160] Oligonucleotides of the disclosure can also be delivered using a variety of membranous molecular assembly delivery methods including polymeric, biodegradable microparticle, or microcapsule delivery devices known in the art. For example, a colloidal dispersion system may be used for targeted delivery of an oligonucleotide agent described herein. Colloidal dispersion systems include macromolecule complexes, nanocapsules, microspheres, beads, and lipid-based systems including oil-in-water emulsions, micelles, mixed micelles, and liposomes. Liposomes are artificial membrane vesicles that are useful as delivery vehicles in vitro and in vivo. It has been shown that large unilamellar vesicles (LUV), which range in size from 0.2-4.0 μm can encapsulate a substantial percentage of an aqueous buffer containing large macromolecules. Liposomes are useful for the transfer and delivery of active ingredients to the site of action. Because the liposomal membrane is structurally similar to biological membranes, when liposomes are applied to a tissue, the liposomal bilayer fuses with bilayer of the cellular membranes. As the merging of the liposome and cell progresses, the internal aqueous contents that include the oligonucleotide are delivered into the cell where the oligonucleotide can specifically bind to a target RNA. In some cases, the liposomes are also specifically targeted, e.g., to direct the oligonucleotide to particular cell types. The composition of the liposome is usually a combination of phospholipids, usually in combination with steroids, especially cholesterol. Other phospholipids or other lipids may also be used. The physical characteristics of liposomes depend on pH, ionic strength, and the presence of divalent cations.

[0161] A liposome containing an oligonucleotide can be prepared by a variety of methods. In one example, the lipid component of a liposome is dissolved in a detergent so that micelles are formed with the lipid component. For example, the lipid component can be an amphipathic cationic lipid or lipid conjugate. The detergent can have a high critical micelle concentration and may be nonionic. Exemplary detergents include cholate, CHAPS, octylglucoside, deoxycholate, and lauroyl sarcosine. The oligonucleotide preparation is then added to the micelles that include the lipid component. The cationic groups on the lipid interact with the oligonucleotide and condense around the oligonucleotide to form a liposome. After condensation, the detergent is removed, e.g., by dialysis, to yield a liposomal preparation of oligonucleotide.

[0162] If necessary, a carrier compound that assists in condensation can be added during the condensation reaction, e.g., by controlled addition. For example, the carrier compound can be a polymer other than a nucleic acid (e.g., spermine or spermidine). The pH can also be adjusted to favor condensation.

[0163] Methods for producing stable polynucleotide delivery vehicles, which incorporate a polynucleotide/cationic lipid complex as a structural component of the delivery vehicle, are further described in, e.g., WO 96/37194, the entire contents of which are incorporated herein by reference. Liposome formation can also include one or more aspects of exemplary methods described in Feigner, P. L. et al., (1987) Proc. Natl. Acad. Sci. USA 8:7413-7417; U.S. Pat. Nos. 4,897,355; 5,171,678; Bangham et al., (1965) M. Mol. Biol. 23:238; Olson et al., (1979) Biochim. Biophys. Acta 557:9; Szoka et al., (1978) Proc. Natl. Acad. Sci. 75: 4194; Mayhew et al., (1984) Biochim. Biophys. Acta 775:169; Kim et al., (1983) Biochim. Biophys. Acta 728:339; and Fukunaga et al., (1984) Endocrinol. 115:757. Commonly used techniques for preparing lipid aggregates of appropriate size for use as delivery vehicles include sonication and freeze-thaw plus extrusion (see, e.g., Mayer et al., (1986) Biochim. Biophys. Acta 858:161. Microfluidization can be used when consistently small (50 to 200 nm) and relatively uniform aggregates are desired (Mayhew et al., (1984) Biochim. Biophys. Acta 775:169). These methods are readily adapted to packaging oligonucleotide preparations into liposomes.

[0164] Liposomes fall into two broad classes. Cationic liposomes are positively charged liposomes which interact with the negatively charged nucleic acid molecules to form a stable complex. The positively charged nucleic acid/liposome complex binds to the negatively charged cell surface and is internalized in an endosome. Due to the acidic pH within the endosome, the liposomes are ruptured, releasing their contents into the cell cytoplasm (Wang et al. (1987) Biochem. Biophys. Res. Commun., 147:980-985).

[0165] Liposomes, which are pH-sensitive or negatively charged, entrap nucleic acids rather than complex with them. Since both the nucleic acid and the lipid are similarly charged, repulsion rather than complex formation occurs. Nevertheless, some nucleic acid is entrapped within the aqueous interior of these liposomes. pH sensitive liposomes have been used to deliver nucleic acids encoding the thymidine kinase gene to cell monolayers in culture. Expression of the exogenous gene was detected in the target cells (Zhou et al. (1992) Journal of Controlled Release, 19:269-274).

[0166] One major type of liposomal composition includes phospholipids other than naturally derived phosphatidylcholine. Neutral liposome compositions, for example, can be formed from dimyristoyl phosphatidylcholine (DMPC) or dipalmitoyl phosphatidylcholine (DPPC). Anionic liposome compositions generally are formed from dimyristoyl phosphatidylglycerol, while anionic fusogenic liposomes are formed primarily from dioleoyl phosphatidylethanolamine (DOPE). Another type of liposomal composition is formed from phosphatidylcholine (PC) such as, for example, soybean PC, and egg PC. Another type is formed from mixtures of phospholipid and/or phosphatidylcholine and/or cholesterol.

[0167] Examples of other methods to introduce liposomes into cells in vitro and in vivo include U.S. Pat. Nos. 5,283,185; 5,171,678; WO 94/00569; WO 93/24640; WO 91/16024; Feigner, (1994) J. Biol. Chem. 269:2550; Nabel, (1993) Proc. Natl. Acad. Sci. 90:11307; Nabel, (1992) Human Gene Ther. 3:649; Gershon, (1993) Biochem. 32:7143; and Strauss, (1992) EMBO J. 11:417.

[0168] Non-ionic liposomal systems have also been examined to determine their utility in the delivery of drugs to the skin, in particular systems comprising non-ionic surfactant and cholesterol. Non-ionic liposomal formulations comprising NOVASOME™ I (glyceryl dilaurate/cholesterol/polyoxyethylene-10-stearyl ether) and NOVASOME™ II (glyceryl distearate/cholesterol/polyoxyethylene-10-stearyl ether) were used to deliver cyclosporin-A into the dermis of mouse skin. Results indicated that such non-ionic liposomal systems were effective in facilitating the deposition of cyclosporine A into different layers of the skin (Hu et al., (1994) S.T.P.Pharma. Sci., 4(6):466).

[0169] Liposomes may also be sterically stabilized liposomes, comprising one or more specialized lipids that result in enhanced circulation lifetimes relative to liposomes lacking such specialized lipids. Examples of sterically stabilized liposomes are those in which part of the vesicle-forming lipid portion of the liposome (A) comprises one or more glycolipids, such as monosialoganglioside G_{M1}, or (B) is derivatized with one or more hydrophilic polymers, such as a polyethylene glycol (PEG) moiety. While not wishing to be bound by any particular theory, it is thought in the art that, at least for sterically stabilized liposomes containing gangliosides, sphingomyelin, or PEG-derivatized lipids, the enhanced circulation half-life of these sterically stabilized liposomes derives from a reduced uptake into cells of the reticuloendothelial system (RES) (Allen et al., (1987) FEBS Letters, 223:42; Wu et al., (1993) Cancer Research, 53:3765).

[0170] Various liposomes comprising one or more glycolipids are known in the art. Papahadjopoulos et al. (Ann. N.Y. Acad. Sci., (1987), 507:64) reported the ability of monosialoganglio side G^{M1}, galactocerebroside sulfate, and phosphatidylinositol to improve blood half-lives of liposomes. These findings were expounded upon by Gabizon et al. (Proc. Natl. Acad. Sci. U.S.A., (1988), 85:6949). U.S. Pat. No. 4,837,028 and WO 88/04924, both to Allen et al., disclose liposomes comprising (1) sphingomyelin and (2) the ganglioside GM1 or a galactocerebroside sulfate ester. U.S. Pat. No. 5,543,152 (Webb et al.) discloses liposomes comprising sphingomyelin. Liposomes comprising 1,2-sn-dimyristoylphosphatidylcholine are disclosed in WO 97/13499 (Lim et al).

[0171] In one embodiment, cationic liposomes are used. Cationic liposomes possess the advantage of being able to fuse to the cell membrane. Non-cationic liposomes, although not able to fuse as efficiently with the plasma membrane, are taken up by macrophages in vivo and can be used to deliver oligonucleotides to macrophages.

[0172] Further advantages of liposomes include: liposomes obtained from natural phospholipids are biocompatible and biodegradable; liposomes can incorporate a wide range of water and lipid soluble drugs; liposomes can protect encapsulated oligonucleotides in their internal compartments from metabolism and degradation (Rosoff, in “Pharmaceutical Dosage Forms,” Lieberman, Rieger and Banker (Eds.), 1988, volume 1, p. 245). Important considerations in the preparation of liposome formulations are the lipid surface charge, vesicle size and the aqueous volume of the liposomes.

[0173] A positively charged synthetic cationic lipid, N-[1-(2,3-dioleyloxy)propyl]-N,N,N-trimethylammonium chloride (DOTMA) can be used to form small liposomes that interact spontaneously with nucleic acid to form lipid-nucleic acid complexes which are capable of fusing with the negatively charged lipids of the cell membranes of tissue culture cells, resulting in delivery of oligonucleotide (see, e.g., Feigner, P. L. et al., (1987) Proc. Natl. Acad. Sci. USA 8:7413-7417, and U.S. Pat. No. 4,897,355 for a description of DOTMA and its use with DNA).

[0174] A DOTMA analogue, 1,2-bis(oleoyloxy)-3-(trimethylammonia)propane (DOTAP) can be used in combination with a phospholipid to form DNA-complexing vesicles. LIPOFECTIN™ Bethesda Research Laboratories, Gaithersburg, Md.) is an effective agent for the delivery of highly anionic nucleic acids into living tissue culture cells that comprise positively charged DOTMA liposomes which interact spontaneously with negatively charged polynucleotides to form complexes. When enough positively charged liposomes are used, the net charge on the resulting complexes is also positive. Positively charged complexes prepared in this way spontaneously attach to negatively charged cell surfaces, fuse with the plasma membrane, and efficiently deliver functional nucleic acids into, for example, tissue culture cells. Another commercially available cationic lipid, 1,2-bis(oleoyloxy)-3,3-(trimethylammonia)propane (“DOTAP”) (Boehringer Mannheim, Indianapolis, Ind.) differs from DOTMA in that the oleoyl moieties are linked by ester, rather than ether linkages.

[0175] Other reported cationic lipid compounds include those that have been conjugated to a variety of moieties including, for example, carboxyspermine which has been conjugated to one of two types of lipids and includes compounds such as 5-carboxyspermylglycine dioctaoleoylamide (“DOGS”) (TRANSFECTAMINE, Promega, Madison, Wis.) and dipalmitoylphosphatidylethanolamine 5-carboxyspermyl-amide (“DPPES”) (see, e.g., U.S. Pat. No. 5,171,678).

[0176] Another cationic lipid conjugate includes derivatization of the lipid with cholesterol (“DC-Chol”) which has been formulated into liposomes in combination with DOPE (See, Gao, X. and Huang, L., (1991) Biochim. Biophys. Res. Commun. 179:280). Lipopolylysine, made by conjugating polylysine to DOPE, has been reported to be effective for transfection in the presence of serum (Zhou, X. et al., (1991) Biochim. Biophys. Acta 1065:8). For certain cell lines, these liposomes containing conjugated cationic lipids, are said to exhibit lower toxicity and provide more efficient transfection than the DOTMA-containing compositions. Other commercially available cationic lipid products include DMRIE and DMRIE-HP (Vical, La Jolla, Calif.) and Lipofectamine (DOSPA) (Life Technology, Inc., Gaithersburg, Md.). Other cationic lipids suitable for the delivery of oligonucleotides are described in WO 98/39359 and WO 96/37194.

[0177] Liposomal formulations are particularly suited for topical administration, liposomes present several advantages over other formulations. Such advantages include reduced side effects related to high systemic absorption of the administered drug, increased accumulation of the administered drug at the desired target, and the ability to administer oligonucleotide into the skin. In some implementations, liposomes are used for delivering oligonucleotide to epidermal cells and also to enhance the penetration of oligonucleotide into dermal tissues, e.g., into skin. For example, the liposomes can be applied topically. Topical delivery of drugs formulated as liposomes to the skin has been documented (see, e.g., Weiner et al., (1992) Journal of Drug Targeting, vol. 2,405-410 and du Plessis et al., (1992) Antiviral Research, 18:259-265; Mannino, R. J. and Fould-Fogerite, S., (1998) Biotechniques 6:682-690; Itani, T. et al., (1987) Gene 56:267-276; Nicolau, C. et al. (1987) Meth. Enzymol. 149:157-176; Straubinger, R. M. and Papahadjopoulos, D. (1983) Meth. Enzymol. 101:512-527; Wang, C. Y. and Huang, L., (1987) Proc. Natl. Acad. Sci. USA 84:7851-7855).

[0178] Non-ionic liposomal systems have also been examined to determine their utility in the delivery of drugs to the skin, in particular systems comprising non-ionic surfactant and cholesterol. Non-ionic liposomal formulations comprising NOVASOME I (glyceryl dilaurate/cholesterol/polyoxyethylene-10-stearyl ether) and NOVASOME II (glyceryl distearate/cholesterol/polyoxyethylene-10-stearyl ether) were used to deliver a drug into the dermis of mouse skin. Such formulations with oligonucleotides are useful for treating a dermatological disorder.

[0179] The targeting of liposomes is also possible based on, for example, organ-specificity, cell-specificity, and organelle-specificity and is known in the art. In the case of a liposomal targeted delivery system, lipid groups can be incorporated into the lipid bilayer of the liposome in order to maintain the targeting ligand in stable association with the liposomal bilayer. Various linking groups can be used for joining the lipid chains to the targeting ligand. Additional methods are known in the art and are described, for example in U.S. Patent Application Publication No. 20060058255, the linking groups of which are herein incorporated by reference.

[0180] Liposomes that include oligonucleotides can be made highly deformable. Such deformability can enable the liposomes to penetrate through pore that are smaller than the average radius of the liposome. For example, transfersomes are yet another type of liposomes, and are highly deformable lipid aggregates which are attractive candidates for drug delivery vehicles. Transfersomes can be described as lipid droplets which are so highly deformable that they are easily able to penetrate through pores which are smaller than the droplet. Transfersomes can be made by adding surface edge activators, usually surfactants, to a standard liposomal composition. Transfersomes that include oligonucleotides can be delivered, for example, subcutaneously by infection in order to deliver oligonucleotides to keratinocytes in the skin. In order to cross intact mammalian skin, lipid vesicles must pass through a series of fine pores, each with a diameter less than 50 nm, under the influence of a suitable transdermal gradient. In addition, due to the lipid properties, these transfersomes can be self-optimizing (adaptive to the shape of pores, e.g., in the skin), self-repairing, and can frequently reach their targets without fragmenting, and often self-loading. Transfersomes have been used to deliver serum albumin to the skin. The transfersome-mediated delivery of serum albumin has been shown to be as effective as subcutaneous injection of a solution containing serum albumin.

[0181] Other formulations amenable to the present disclosure are described in PCT Publication Nos. WO 2009/088891, WO 2009/132131, and WO 2008/042973, which are hereby incorporated by reference in their entirety.

[0182] Surfactants find wide application in formulations such as emulsions (including microemulsions) and liposomes. The most common way of classifying and ranking the properties of the many different types of surfactants, both natural and synthetic, is by the use of the hydrophile/lipophile balance (HLB). The nature of the hydrophilic group (also known as the “head”) provides the most useful means for categorizing the different surfactants used in formulations (Rieger, in Pharmaceutical Dosage Forms, Marcel Dekker, Inc., New York, N.Y., 1988, p. 285).

[0183] If the surfactant molecule is not ionized, it is classified as a nonionic surfactant. Nonionic surfactants find wide application in pharmaceutical and cosmetic products and are usable over a wide range of pH values. In general, their HLB values range from 2 to about 18 depending on their structure. Nonionic surfactants include nonionic esters such as ethylene glycol esters, propylene glycol esters, glyceryl esters, polyglyceryl esters, sorbitan esters, sucrose esters, and ethoxylated esters. Nonionic alkanolamides and ethers such as fatty alcohol ethoxylates, propoxylated alcohols, and ethoxylated/propoxylated block polymers are also included in this class. The polyoxyethylene surfactants are the most popular members of the nonionic surfactant class.

[0184] If the surfactant molecule carries a negative charge when it is dissolved or dispersed in water, the surfactant is classified as anionic. Anionic surfactants include carboxylates such as soaps, acyl lactylates, acyl amides of amino acids, esters of sulfuric acid such as alkyl sulfates and ethoxylated alkyl sulfates, sulfonates such as alkyl benzene sulfonates, acyl isethionates, acyl taurates and sulfosuccinates, and phosphates. The most important members of the anionic surfactant class are the alkyl sulfates and the soaps.

[0185] If the surfactant molecule carries a positive charge when it is dissolved or dispersed in water, the surfactant is classified as cationic. Cationic surfactants include quaternary ammonium salts and ethoxylated amines. The quaternary ammonium salts are the most used members of this class.

[0186] If the surfactant molecule has the ability to carry either a positive or negative charge, the surfactant is classified as amphoteric. Amphoteric surfactants include acrylic acid derivatives, substituted alkylamides, N-alkylbetaines, and phosphatides.

[0187] The use of surfactants in drug products, formulations and in emulsions has been reviewed (Rieger, in Pharmaceutical Dosage Forms, Marcel Dekker, Inc., New York, N.Y., 1988, p. 285).

[0188] The oligonucleotides for use in the methods of the disclosure can also be provided as micellar formulations. Micelles are a particular type of molecular assembly in which amphipathic molecules are arranged in a spherical structure such that all the hydrophobic portions of the molecules are directed inward, leaving the hydrophilic portions in contact with the surrounding aqueous phase. The converse arrangement exists if the environment is hydrophobic.

### Lipid Nanoparticle-Based Delivery Methods

[0189] Oligonucleotides in the disclosure may be fully encapsulated in a lipid formulation, e.g., a lipid nanoparticle (LNP), or other nucleic acid-lipid particle. LNPs are useful for systemic applications, as they exhibit extended circulation lifetimes following intravenous (i.v.) injection and accumulate at distal sites (e.g., sites physically separated from the administration site). LNPs include “pSPLP,” which include an encapsulated condensing agent-nucleic acid complex as set forth in PCT Publication No. WO 00/03683. The particles of the present disclosure typically have a mean diameter of about 50 nm to about 150 nm, more typically about 60 nm to about 130 nm, more typically about 70 nm to about 110 nm, most typically about 70 nm to about 90 nm, and are substantially nontoxic. In addition, the nucleic acids when present in the nucleic acid-lipid particles of the present disclosure are resistant in aqueous solution to degradation with a nuclease. Nucleic acid-lipid particles and their method of preparation are disclosed in, e.g., U.S. Pat. Nos. 5,976,567; 5,981,501; 6,534,484; 6,586,410; 6,815,432; U.S. Publication No. 2010/0324120 and PCT Publication No. WO 96/40964.

[0190] Non-limiting examples of cationic lipids include N,N-dioleyl-N,N-dimethylammonium chloride (DODAC), N,N-distearyl-N,N-dimethylammonium bromide (DDAB), N--(I-(2,3-dioleoyloxy)propyl)-N,N,N-trimethylammonium chloride (DOTAP), N--(I-(2,3-dioleyloxy)propyl)-N,N,N-trimethylammonium chloride (DOTMA), N,N-dimethyl-2,3-dioleyloxy)propylamine (DODMA), 1,2-DiLinoleyloxy-N,N-dimethylaminopropane (DLinDMA), 1,2-Dilinolenyloxy-N,N-dimethylaminopropane (DLenDMA), 1,2-Dilinoleylcarbamoyloxy-3-dimethylaminopropane (DLin-C-DAP), 1,2-Dilinoleyoxy-3-(dimethylamino)acetoxypropane (DLin-DAC), 1,2-Dilinoleyoxy-3-morpholinopropane (DLin-MA), 1,2-Dilinoleoyl-3-dimethylaminopropane (DLinDAP), 1,2-Dilinoleylthio-3-dimethylaminopropane (DLin-S-DMA), 1-Linoleoyl-2-linoleyloxy-3-dimethylaminopropane (DLin-2-DMAP), 1,2-Dilinoleyloxy-3-trimethylaminopropane chloride salt (DLin-TMA.Cl), 1,2-Dilinoleoyl-3-trimethylaminopropane chloride salt (DLin-TAP.Cl), 1,2-Dilinoleyloxy-3-(N-methylpiperazino)propane (DLin-MPZ), or 3-(N,N-Dilinoleylamino)-1,2-propanediol (DLinAP), 3-(N,N-Dioleylamino)-1,2-propanedio (DOAP), 1,2-Dilinoleyloxo-3-(2-N,N-dimethylamino)ethoxypropane (DLin-EG-DMA), 1,2-Dilinolenyloxy-N,N-dimethylaminopropane (DLinDMA), 2,2-Dilinoleyl-4-dimethylaminomethyl-[1,3]-dioxolane (DLin-K-DMA) or analogs thereof, (3aR,5s,6aS)—N,N-dimethyl-2,2-di((9Z,12Z)-octadeca-9,12-dienyetetrahydro- 3aH-cyclopenta[d][1,3]dioxol-5-amine (ALN100), (6Z,9Z,28Z,31Z)-heptatriaconta-6,9,28,31-tetraen-19-yl4-(dimethylamino)bu-tanoate (MC3), 1,1′-(2-(4-(2-((2-(bis(2-hydroxydodecyl)amino)ethyl)(2-hydroxydodecyl)ami-no)ethyl)piperazin-1-yeethylazanediyedidodecan-2-ol (Tech G1), or a mixture thereof. The cationic lipid can comprise, for example, from about 20 mol % to about 50 mol % or about 40 mol % of the total lipid present in the particle.

[0191] The ionizable/non-cationic lipid can be an anionic lipid or a neutral lipid including, but not limited to, distearoylphosphatidylcholine (DSPC), dioleoylphosphatidylcholine (DOPC), dipalmitoylphosphatidylcholine (DPPC), dioleoylphosphatidylglycerol (DOPG), dipalmitoylphosphatidylglycerol (DPPG), dioleoyl-phosphatidylethanolamine (DOPE), palmitoyloleoylphosphatidylcholine (POPC), palmitoyloleoylphosphatidylethanolamine (POPE), dioleoyl-phosphatidylethanolamine 4-(N-maleimidomethyl)-cyclohexane-1-carboxylate (DOPE-mal), dipalmitoyl phosphatidyl ethanolamine (DPPE), dimyristoylphosphoethanolamine (DMPE), distearoyl-phosphatidyl-ethanolamine (DSPE), 16-O-monomethyl PE, 16-O-dimethyl PE, 18-1-trans PE, 1-stearoyl-2-oleoyl-phosphatidyethanolamine (SOPE), cholesterol, or a mixture thereof. The non-cationic lipid can be, for example, from about 5 mol % to about 90 mol %, about 10 mol %, or about 60 mol % if cholesterol is included, of the total lipid present in the particle.

[0192] The conjugated lipid that inhibits aggregation of particles can be, for example, a polyethyleneglycol (PEG)-lipid including, without limitation, a PEG-diacylglycerol (DAG), a PEG-dialkyloxypropyl (DAA), a PEG-phospholipid, a PEG-ceramide (Cer), or a mixture thereof. The PEG-DAA conjugate can be, for example, a PEG-dilauryloxypropyl (C₁₂), a PEG-dimyristyloxypropyl (C₁₄), a PEG-dipalmityloxypropyl (C₁₆), or a PEG-distearyloxypropyl (Cis). The conjugated lipid that prevents aggregation of particles can be, for example, from 0 mol % to about 20 mol % or about 2 mol % of the total lipid present in the particle.

[0193] In some embodiments, the nucleic acid-lipid particle further includes cholesterol at, e.g., about 10 mol % to about 60 mol % or about 50 mol % of the total lipid present in the particle.

[0194] The ASO may also be delivered in a lipidoid. The synthesis of lipidoids has been extensively described and formulations containing these compounds are particularly suited for delivery of modified nucleic acid molecules or ASOs (see Mahon et al, Bioconjug Chem. 2010 21: 1448-1454; Schroeder et al, J Intern Med. 2010 267:9-21; Akinc et al, Nat Biotechnol. 2008 26:561-569; Love et al, Proc Natl Acad Sci USA. 2010 107: 1864-1869; Siegwart et al, Proc Natl Acad Sci USA. 2011 108: 12996-3001; all of which are incorporated herein in their entireties).

[0195] Lipid compositions for RNA delivery are disclosed in WO2012170930A1, WO2013149141A1, and WO2014152211A1, each of which are hereby incorporated by reference.

### IV. Therapeutic Applications

[0196] The present disclosure provides methods for treating or preventing diseases and disorders of the central nervous system (CNS) and peripheral nervous system (PNS) in a subject in need thereof, including SYNGAP1-related disorders (e.g., associated with SYNGAP1 mutations), such as SYNGAP1-related intellectual disability (ID), mental retardation, autosomal dominant 5 (MRDS), or SYNGAP1-related non-syndromic intellectual disability (NSID)), affective disorders (e.g., depression), schizophrenia, Alzheimer's disease, Parkinson's disease, Huntington's disease, an autism spectrum disorder (ASD) (e.g., Asperger's syndrome, autistic disorder, and Pervasive Developmental Disorder-Not Otherwise Specified (PDD-NOS)). Subjects having a CNS or PNS trauma (e.g., brain or spinal cord ischemia or trauma, stroke, or a neurological deficit associated with surgery or anesthesia) may also be treated in accordance with the methods provided herein. The methods include administering an ASO provided herein or a pharmaceutical composition comprising the ASO to the subject. While not wishing to be bound by theory, the ASOs provided herein are believed to exert their desirable effects through their ability to modulate (e.g., increase or decrease) the levels of SYNGAP1 protein, SYNGAP1 mRNA, and/or SYNGAP1 activity within a cell of a subject, e.g., by increasing the level of the SYNGAP1 protein in a cell of the subject (e.g., a human, a mouse, a hamster, a non-human primate (e.g., a monkey)).

[0197] Another aspect of the present disclosure includes methods of modulating (e.g., increasing or decreasing) expression of SYNGAP1 in a cell of a subject, comprising contacting the cell with an ASO of the disclosure (or a pharmaceutical composition including the ASO), thereby treating a disease or disorder in the subject (e.g., a disease or disorder provided herein).

[0198] Another aspect of the disclosure includes methods of modulating (e.g., increasing or reducing) the level of SYNGAP1 mRNA or protein in a cell of a subject identified as having a disease or disorder provided herein (e.g., a SYNGAP1-related disorder).

[0199] Still another aspect includes methods of modulating (e.g., increasing or reducing) expression of a SYNGAP1 gene in a cell (e.g., in vivo, ex vivo, or in vitro) including contacting the cell with an ASO of the disclosure (or a pharmaceutical composition including the ASO), thereby increasing the expression of a SYNGAP1 gene in the cell. In some embodiments, the cell is a mammalian cell (e.g., a human cell such as a human neuron). The methods may include contacting a cell with an ASO of the disclosure (or a pharmaceutical composition including the ASO), in an amount effective to increase expression of a SYNGAP1 gene in the cell, thereby increasing expression of a SYNGAP1 gene in the cell. In some embodiments, contacting the cell with the ASO (or a pharmaceutical composition including the ASO) modulates (e.g., increases) the amount of SYNGAP1 mRNA in the cell. In some embodiments, contacting the cell with the ASO (or a pharmaceutical composition including the ASO) modulates (e.g., increases or decreases) the amount of SYNGAP1 protein in the cell. In some embodiments, contacting the cell with the ASO (or a pharmaceutical composition including the ASO) modulates (e.g., increases or decreases) the amount of SYNGAP1 activity in the cell.

[0200] In yet another aspect, the disclosure provides an ASO of the disclosure (or a pharmaceutical composition including the ASO) for use as a medicament. Further, the disclosure provides for an ASO of the disclosure (or a pharmaceutical composition including the ASO) for use in therapy.

[0201] Contacting of a cell with an ASO may be performed in vitro, ex vivo, or in vivo. Contacting a cell in vivo with the oligonucleotide includes contacting a cell or group of cells within a subject, e.g., a human subject, with the ASO. Combinations of in vitro, ex vivo, and in vivo methods of contacting a cell are also possible. Contacting a cell may be direct or indirect, as discussed above. Furthermore, contacting a cell may be accomplished via a targeting ligand, including any ligand described herein or known in the art. In some embodiments, the targeting ligand is a carbohydrate moiety, e.g., a GalNAc3 ligand, or any other ligand that directs the oligonucleotide to a site of interest. In some embodiments, the cell can be a neuron. For example, the neuron can be a neuron from the CNS, prefrontal cortex, motor cortex, or hippocampus. In some embodiments, the cell is a neuron. In some embodiments, the neuron is a glutamatergic neuron. In some embodiment, the ASO is administered with one or more agents capable of promoting penetration of the ASO across the blood-brain barrier. For example, in some embodiments, the ASO is coupled to a composition that promotes penetration or transportation of the ASO across the blood-brain barrier, e.g., a viral vector or an antibody to transferrin receptor.

[0202] Administration of an ASOs or pharmaceutical compositions disclosed herein to a subject can be intravenous, intraarterial, intraperitoneal, intramuscular, subcutaneous, transdermal, intrapleural, intrathecal, intracerebral, intraventricular, intracerebroventicular, intracisternal, intraspinal, peri-spinal, intracavitary, by perfusion through a catheter or by direct intralesional injection. In certain embodiments, the ASO or pharmaceutical composition is administered using an intracranial or intravertebral needle or catheter. In certain embodiments, the ASO or pharmaceutical composition is administered systemically. In certain embodiments, the ASO or pharmaceutical composition is administered by a parenteral route. For example, in certain embodiments, the ASO or pharmaceutical composition is administered by intravenously (e.g., by intravenous infusion), for example, with a prefilled bag, a prefilled pen, or a prefilled syringe. In other embodiments, the ASO or pharmaceutical composition is administered locally to an organ or tissue in which an increase in the target gene expression is desirable (e.g., neuron cells).

[0203] In some embodiments, the ASO is administered to a subject such that the ASO is delivered to a specific site within the subject. Such targeted delivery can be achieved by either systemic administration or local administration. The increase of expression of SYNGAP1 may be assessed by measuring the level or change in the level of SYNGAP1 mRNA or SYNGAP1 protein in a sample (e.g., blood, tissue (e.g., neurological tissue), a neuron cell sample (e.g., hippocampal cells, motor cortex cells, or prefrontal cortex cells), or neurological fluid (e.g., cerebrospinal fluid (CSF)) derived from a specific site within the subject. In certain embodiments, the methods include a clinically relevant increase of expression of SYNGAP1, e.g., as demonstrated by a clinically relevant outcome after treatment of a subject with an agent to reduce the expression of SYNGAP1.

[0204] In some embodiments, the methods provided herein may ameliorate or prevent the onset of one or more symptoms or conditions associated with a disease or disorder described herein (e.g. a SYNGAP1-related disorder), including epilepsy, cognitive impairment (e.g., moderate to severe cognitive impairment), hypotonia (e.g., mild hypotonia), global developmental delay, delayed language development, disordered sleep, oral dyspraxia, inattention, impulsivity, physical aggression, mood swings, sullenness, and rigidity. In some embodiments of the methods provided herein, an ASO provided herein (or a pharmaceutical composition including the ASO) is administered in an amount and for a time effective to result in reduction or improvement (e.g., by 10%, 20%, 30%, 40%, 50%, 60%, 70%, 80%, 90%, or 100%) of one or more symptoms associated with a disease or disorder described herein (e.g., a SYNGAP1-related disorder).

### Modulation of SYNGAP1 Expression Level

[0205] In some aspects, the therapeutic methods disclosed herein, using an ASO that targets a SYNGAP1 regRNA, result in modulated (e.g., increased or decreased) SYNGAP1 gene expression levels in a subject. Modulated expression of a SYNGAP1 gene includes any level of modulating of a SYNGAP1 gene, e.g., at least partial modulation of the expression of a SYNGAP1 gene. Modulated SYNGAP1 gene expression (e.g., increased or decreased) may be assessed by determining absolute or relative levels of one or more of these variables compared with a control level. The control level may be any type of control level that is utilized in the art, e.g., a pre-dose baseline level, or a level determined from a similar subject, cell, or sample that is untreated or treated with a control (such as, e.g., buffer only (vehicle) control or inactive agent control). In certain embodiments, the methods provided herein result a clinically relevant modulation (e.g., an increase or decrease) of expression of SYNGAP1 gene, e.g. as demonstrated by a clinically relevant outcome after treatment of a subject with an agent to modulate (e.g., increase) the expression of SYNGAP1.

[0206] In certain embodiments, the methods disclosed herein result in increased SYNGAP1 gene expression in a cell, tissue (e.g., neurological tissue), a neuron cell sample (e.g., hippocampal cells, motor cortex cells, or prefrontal cortex cells), or sample (e.g., neurological fluid (e.g., cerebrospinal fluid (CSF)) of a subject by at least about 1%, at least about 2%, at least about 5%, at least about 10%, at least about 15%, at least about 20%, at least about 25%, at least about 30%, at least about 35%, at least about 40%, at least about 45%, at least about 50%, at least about 55%, at least about 60%, at least about 65%, at least about 70%, at least about 75%, at least about 80%, at least about 85%, at least about 90%, at least about 91%, at least about 92%, at least about 93%, at least about 94%, at least about 95%, at least about 96%, at least about 97%, at least about 98%, or at least about 99%, relative to the pre-dose, pre-administration, or pre-exposure baseline level. In certain embodiments, the methods disclosed herein increases SYNGAP1 gene expression by at least 2-fold, at least 3-fold, at least 4-fold, at least 5-fold, at least 6-fold, at least-7 fold, at least 8-fold, at least 9-fold, or at least 10-fold relative to the pre-dose baseline level. In certain embodiments, the subject has a deficiency in SYNGAP1 expression, and the method disclosed herein restores the SYNGAP1 expression level (e.g., SYNGAP1 protein level or SYNGAP1 mRNA level) or SYNGAP1 protein activity to at least 20%, at least 30%, at least 40%, at least 50%, at least 60%, at least 70%, at least 80%, at least 90%, or at least 100% of the average SYNGAP1 expression level (e.g., SYNGAP1 protein level or SYNGAP1 mRNA level) or SYNGAP1 protein activity in similar cells, tissues or subjects (e.g., of the same species, of the like age and/or of the same sex) that do not have a deficiency in SYNGAP1 expression.

[0207] In some embodiments, an ASO of the disclosure may enhance the production of SYNGAP1 mRNA (e.g., in a cell or in a cell, tissue, or sample of a subject) by at least about 1%, at least about 2%, at least about 5%, at least about 10%, at least about 15%, at least about 20%, at least about 25%, at least about 30%, at least about 35%, at least about 40%, at least about 45%, at least about 50%, at least about 55%, at least about 60%, at least about 65%, at least about 70%, at least about 75%, at least about 80%, at least about 85%, at least about 90%, at least about 91%, at least about 92%, at least about 93%, at least about 94%, at least about 95%, at least about 96%, at least about 97%, at least about 98%, or at least about 99%, at least about 100%, at least about 150%, at least about 200%, at least about 250%, at least about 300%, at least about 350%, at least about 400%, at least about 500%, at least about 600%, at least about 700%, at least about 800%, at least about 900% or more, relative to the pre-dose, pre-administration, or pre-exposure baseline level. In some embodiments, an ASO of the disclosure may enhance the production of SYNGAP1 mRNA (e.g., in a cell or in a cell, tissue, or sample of a subject) by at least 1-fold, at least 2-fold, at least 3-fold, at least 4-fold, at least 5-fold, at least 6-fold, at least 7-fold, at least 8-fold, at least 9-fold, or at least 10-fold or more, relative to the pre-dose, pre-administration, or pre-exposure baseline level.

[0208] In certain embodiments, the methods disclosed herein result in decreased SYNGAP1 gene expression in a cell, tissue (e.g., neurological tissue), a neuron cell sample (e.g., hippocampal cells, motor cortex cells, or prefrontal cortex cells), or sample (e.g., neurological fluid (e.g., cerebrospinal fluid (CSF)) of a subject by at least about 1%, at least about 2%, at least about 5%, at least about 10%, at least about 15%, at least about 20%, at least about 25%, at least about 30%, at least about 35%, at least about 40%, at least about 45%, at least about 50%, at least about 55%, at least about 60%, at least about 65%, at least about 70%, at least about 75%, at least about 80%, at least about 85%, at least about 90%, at least about 91%, at least about 92%, at least about 93%, at least about 94%, at least about 95%, at least about 96%, at least about 97%, at least about 98%, or at least about 99%, relative to the pre-dose, pre-administration, or pre-exposure baseline level. In certain embodiments, the methods disclosed herein result in decreased SYNGAP1 gene expression by at least 2-fold, at least 3-fold, at least 4-fold, at least 5-fold, at least 6-fold, at least-7 fold, at least 8-fold, at least 9-fold, or at least 10-fold relative to the pre-dose baseline level.

[0209] In some embodiments, an ASO of the disclosure may reduce the production of SYNGAP1 mRNA (e.g., in a cell or in a cell, tissue, or sample of a subject) by at least about 1%, at least about 2%, at least about 5%, at least about 10%, at least about 15%, at least about 20%, at least about 25%, at least about 30%, at least about 35%, at least about 40%, at least about 45%, at least about 50%, at least about 55%, at least about 60%, at least about 65%, at least about 70%, at least about 75%, at least about 80%, at least about 85%, at least about 90%, at least about 91%, at least about 92%, at least about 93%, at least about 94%, at least about 95%, at least about 96%, at least about 97%, at least about 98%, or at least about 99%, at least about 100%, at least about 150%, at least about 200%, at least about 250%, at least about 300%, at least about 350%, at least about 400%, at least about 500%, at least about 600%, at least about 700%, at least about 800%, at least about 900% or more, relative to the pre-dose, pre-administration, or pre-exposure baseline level. In some embodiments, an ASO of the disclosure may reduce the production of SYNGAP1 mRNA (e.g., in a cell or in a cell, tissue, or sample of a subject) by at least 1-fold, at least 2-fold, at least 3-fold, at least 4-fold, at least 5-fold, at least 6-fold, at least 7-fold, at least 8-fold, at least 9-fold, or at least 10-fold or more, relative to the pre-dose, pre-administration, or pre-exposure baseline level.

[0210] In some embodiments, the expression of SYNGAP1 protein (e.g., one or more isoforms of SYNGAP1 protein, e.g., SYNGAP1 Aα1, SYNGAP1 Aα2, SYNGAP1 Aβ, SYNGAP1 Aγ, SYNGAP1 Bα1, SYNGAP1 Bα2, SYNGAP1 Bβ, SYNGAP1 Bγ, SYNGAP1 Cα1, SYNGAP1 Cα2, SYNGAP1 Cβ, SYNGAP1 Cγ, or any combination thereof) is modulated (e.g., increased or decreased) following treatment with, or administration of, an ASO of the disclosure. In some embodiments, the expression of SYNGAP1 protein (e.g., in a cell or in a cell, tissue, or sample of a subject (e.g., neurological tissue or neurological fluid (e.g., cerebrospinal fluid (CSF))) is modulated (e.g., increased or decreased) by at least about 1%, at least about 2%, at least about 5%, at least about 10%, at least about 15%, at least about 20%, at least about 25%, at least about 30%, at least about 35%, at least about 40%, at least about 45%, at least about 50%, at least about 55%, at least about 60%, at least about 65%, at least about 70%, at least about 75%, at least about 80%, at least about 85%, at least about 90%, at least about 91%, at least about 92%, at least about 93%, at least about 94%, at least about 95%, at least about 96%, at least about 97%, at least about 98%, or at least about 99%, at least about 100%, at least about 150%, at least about 200%, at least about 250%, at least about 300%, at least about 350%, at least about 400%, at least about 500%, at least about 600%, at least about 700%, at least about 800%, at least about 900% or more, relative to the pre-dose, pre-administration, or pre-exposure baseline level. In some embodiments, the expression of SYNGAP1 protein (e.g., in a cell or in a cell, tissue, or sample of a subject (e.g., neurological tissue or neurological fluid (e.g., cerebrospinal fluid (CSF))) is increased by at least 1-fold, at least 2-fold, at least 3-fold, at least 4-fold, at least 5-fold, at least 6-fold, at least 7-fold, at least 8-fold, at least 9-fold, or at least 10-fold or more, relative to the pre-dose, pre-administration, or pre-exposure baseline level.

[0211] The expression of a SYNGAP1 gene may be assessed based on the level of any variable associated with SYNGAP1 gene expression, e.g., SYNGAP1 mRNA level or SYNGAP1 protein level. In certain embodiments, the expression level or activity of SYNGAP1 herein refers to the average expression level or activity of SYNGAP1 in the brain (e.g., in neuronal cells of a mammal or human subject).

[0212] In certain embodiments, surrogate markers can be used to detect modulation (e.g., an increase or decrease) of SYNGAP1 expression level or SYNGAP1 activity. For example, effective treatment of a disease or disorder provided herein (e.g., a SYNGAP1-related disorder), as demonstrated by acceptable diagnostic and monitoring criteria with an agent to increase SYNGAP1 expression can be understood to demonstrate a clinically relevant increase in SYNGAP1.

[0213] Increased expression of SYNGAP1 gene may be manifested by an increase of the amount of mRNA expressed by a first cell or group of cells (such cells may be present, for example, in a sample derived from a subject) in which a SYNGAP1 gene is transcribed and which has or have been treated (e.g., by contacting the cell or cells with an oligonucleotide of the disclosure, or by administering an oligonucleotide of the disclosure to a subject in which the cells are or were present) such that the expression of a SYNGAP1 gene is increased, as compared to a second cell or group of cells substantially identical to the first cell or group of cells but which has not or have not been so treated (control cell(s) not treated with an oligonucleotide or not treated with an oligonucleotide targeted to the gene of interest). Decreased expression of SYNGAP1 gene may be manifested by a decrease of the amount of mRNA expressed by a first cell or group of cells (such cells may be present, for example, in a sample derived from a subject) in which a SYNGAP1 gene is transcribed and which has or have been treated (e.g., by contacting the cell or cells with an oligonucleotide of the disclosure, or by administering an oligonucleotide of the disclosure to a subject in which the cells are or were present) such that the expression of a SYNGAP1 gene is decreased, as compared to a second cell or group of cells substantially identical to the first cell or group of cells but which has not or have not been so treated (control cell(s) not treated with an oligonucleotide or not treated with an oligonucleotide targeted to the gene of interest).

[0214] In other embodiments, an increase or decrease in the expression of a SYNGAP1 gene may be assessed in terms of an increase of a parameter that is functionally linked to SYNGAP1 gene expression, e.g., SYNGAP1 protein expression or SYNGAP1 activity. An increase or decrease in SYNGAP1 protein levels, mRNA levels or activity may be determined in any cell expressing SYNGAP1, either endogenous or heterologous from an expression construct, and using any assay known in the art.

[0215] An increase or decrease of SYNGAP1 expression may be manifested by an increase or decrease in the level of the SYNGAP1 protein that is expressed by a cell or group of cells (e.g., the level of protein expressed in a sample derived from a subject), relative to a control cell or a control group of cells. An increase or decrease of SYNGAP1 expression may also be manifested by an increase in the level of the SYNGAP1 mRNA level in a treated cell or group of cells, relative to a control cell or a control group of cells.

[0216] A control cell or group of cells that may be used to assess the increase or decrease of the expression of a SYNGAP1 gene includes a cell or group of cells that has not yet been contacted with an oligonucleotide of the disclosure. For example, the control cell or group of cells may be derived from an individual subject (e.g., a human or animal subject) prior to treatment of the subject with an oligonucleotide.

[0217] The level of SYNGAP1 mRNA that is expressed by a cell or group of cells may be determined using any method known in the art for assessing mRNA expression. In one embodiment, the level of expression of SYNGAP1 in a sample is determined by detecting a transcribed polynucleotide, or portion thereof, e.g., mRNA of the SYNGAP1 gene. RNA may be extracted from cells using RNA extraction techniques including, for example, using acid phenol/guanidine isothiocyanate extraction (RNAzol B; Biogenesis), RNEASY™ RNA preparation kits (Qiagen) or PAXgene (PreAnalytix, Switzerland). Typical assay formats utilizing ribonucleic acid hybridization include nuclear run-on assays, RT-PCR, RNase protection assays, northern blotting, in situ hybridization, and microarray analysis. Circulating SYNGAP1 mRNA may be detected using methods the described in PCT Publication WO 2012/177906, the entire contents of which are hereby incorporated herein by reference. In some embodiments, the level of expression of SYNGAP1 is determined using a nucleic acid probe. The term “probe,” as used herein, refers to any molecule that is capable of selectively binding to a specific SYNGAP1 sequence, e.g. to an mRNA or polypeptide. Probes can be synthesized by one of skill in the art, or derived from appropriate biological preparations. Probes may be specifically designed to be labeled. Examples of molecules that can be utilized as probes include, but are not limited to, RNA, DNA, proteins, antibodies, and organic molecules.

[0218] Isolated mRNA can be used in hybridization or amplification assays that include, but are not limited to, Southern or northern analyses, polymerase chain reaction (PCR) analyses, and probe arrays. One method for the determination of mRNA levels involves contacting the isolated mRNA with a nucleic acid molecule (probe) that can hybridize to SYNGAP1 mRNA. In one embodiment, the mRNA is immobilized on a solid surface and contacted with a probe, for example by running the isolated mRNA on an agarose gel and transferring the mRNA from the gel to a membrane, such as nitrocellulose. In an alternative embodiment, the probe(s) are immobilized on a solid surface and the mRNA is contacted with the probe(s), for example, in an AFFYMETRIX gene chip array. A skilled artisan can readily adapt known mRNA detection methods for use in determining the level of SYNGAP1 mRNA.

[0219] An alternative method for determining the level of expression of SYNGAP1 in a sample involves the process of nucleic acid amplification and/or reverse transcriptase (to prepare cDNA) of for example mRNA in the sample, e.g., by RT-PCR (the experimental embodiment set forth in Mullis, 1987, U.S. Pat. No. 4,683,202), ligase chain reaction (Barany (1991) Proc. Natl. Acad. Sci. USA 88:189-193), self-sustained sequence replication (Guatelli et al. (1990) Proc. Natl. Acad. Sci. USA 87:1874-1878), transcriptional amplification system (Kwoh et al. (1989) Proc. Natl. Acad. Sci. USA 86:1173-1177), Q-Beta Replicase (Lizardi et al. (1988) Bio/Technology 6:1197), rolling circle replication (Lizardi et al., U.S. Pat. No. 5,854,033) or any other nucleic acid amplification method, followed by the detection of the amplified molecules using techniques well known to those of skill in the art. These detection schemes are especially useful for the detection of nucleic acid molecules if such molecules are present in very low numbers. In particular aspects of the disclosure, the level of expression of SYNGAP1 is determined by quantitative fluorogenic RT-PCR (i.e., the TaqMan™ System) or the DUAL-GLO® Luciferase assay.

[0220] The expression levels of SYNGAP1 mRNA may be monitored using a membrane blot (such as used in hybridization analysis such as northern, Southern, dot, and the like), or microwells, sample tubes, gels, beads or fibers (or any solid support comprising bound nucleic acids). See U.S. Pat. Nos. 5,770,722; 5,874,219; 5,744,305; 5,677,195; and 5,445,934, which are incorporated herein by reference. The determination of SYNGAP1 expression level may also comprise using nucleic acid probes in solution.

[0221] In some embodiments, the level of mRNA expression is assessed using branched DNA (bDNA) assays, quantitative PCR (qPCR), real-time quantitative PCR (RT-qPCR), multiplex qPCR or RT-qPCR, RNA-seq, or microarray analysis. Such methods can also be used for the detection of SYNGAP1 nucleic acids.

[0222] The level of SYNGAP1 protein expression may be determined using any method known in the art for the measurement of protein levels. Such methods include, for example, electrophoresis, capillary electrophoresis, high performance liquid chromatography (HPLC), thin layer chromatography (TLC), hyperdiffusion chromatography, fluid or gel precipitin reactions, absorption spectroscopy, a colorimetric assays, spectrophotometric assays, flow cytometry, FACS, immunodiffusion (single or double), immunoelectrophoresis, western blotting, radioimmunoassay (RIA), enzyme-linked immunosorbent assays (ELISAs), immunofluorescent assays, electrochemiluminescence assays, Luminex, MSD, FISH, and the like. Such assays can also be used for the detection of proteins indicative of the presence or replication of SYNGAP1 proteins.

### Examples

[0223] Below are examples of specific embodiments for carrying out the present disclosure. The examples are offered for illustrative purposes only, and are not intended to limit the scope of the present disclosure in any way. Efforts have been made to ensure accuracy with respect to numbers used (e.g., amounts, temperatures, etc.), but some experimental error and deviation should, of course, be allowed for.

[0224] The practice of the present disclosure will employ, unless otherwise indicated, conventional methods of protein chemistry, biochemistry, recombinant DNA techniques and pharmacology, within the skill of the art. Such techniques are explained fully in the literature. See, e.g., T. E. Creighton, Proteins: Structures and Molecular Properties (W.H. Freeman and Company, 1993); A. L. Lehninger, Biochemistry (Worth Publishers, Inc., current addition); Sambrook, et al., Molecular Cloning: A Laboratory Manual (2nd Edition, 1989); Methods In Enzymology (S. Colowick and N. Kaplan eds., Academic Press, Inc.); Remington's Pharmaceutical Sciences, 18th Edition (Easton, Pennsylvania: Mack Publishing Company, 1990); Carey and Sundberg Advanced Organic Chemistry 3^{rd} Ed. (Plenum Press) Vols A and B(1992).

### Example 1: Modulation of SYNGAP1 Expression Using SYNGAP1 regRNA-Targeting ASOs

[0225] Four human SYNGAP1 regRNA targets were identified in the human genome (RR86, RR87, RR88, and RR93). To assess the expression of the human SYNGAP1 (hSYNGAP1) regRNAs RR86 and RR93 in HEK293 cells, SK-N-AS cells and human brain tissue, RNA capture seq and real time quantitative PCR (qPCR) were used. For this analysis, the qPCR reference gene was PPIA. As shown in FIG. 3, SYNGAP1 regRNAs RR86 and RR93 were detected in HEK293 and SK-N-AS cells, as well as human brain samples.

[0226] To assess the ability of ASOs targeting hSYGNAP1 regRNAs to modulate the expression of SYNGAP1, 210 ASOs targeting the human SYNGAP1 regRNAs were synthesized. 105 ASOs were steric oligonucleotides and 105 ASOs were gapmers. The ASOs were screened in SK-N-AS and HEK293 cells at 120 nM to determine their efficacy in increasing human SYNGAP1 mRNA levels. Briefly, SK-N-AS or HEK293 cells were reverse transfected with ASOs at 120 nM on Day 0 and cells were collected for mRNA quantification via qPCR on Day 2. Cells that were not treated with ASOs or were treated with either a gapmer non-targeting control (NTC) ASO (CO-1588) or a steric NTC ASO (CO-1589) were used as controls. mRNA was normalized to mRNA from cells treated with the gapmer NTC ASO (CO-1588).

[0227] From this initial screen, 11 ASOs were selected for chemistry fine tuning by altering the chemistry, type, and position of chemical modification of the selected ASOs. 39 additional ASOs were synthesized from the basewalking and tiling were further tested for dose dependent efficacy. 44 ASOs including additional chemical modifications were synthesized, including 4 extended gapmers, 24 LNA gapmers, 8 with P0/PS bonds, and 8 mixmers. ASOs that showed efficacy in increasing hSYNGAP1 mRNA at 120 nM in SK-N-AS and 7EK293 cells (as described above) were further tested for dose-dependent efficacy at 60 nM, 90 nM, or 120 nM in SK-N-AS cells or 12, 30, 60, 90, 120, or 150 nM in HEK293 cells.

[0228] ASO sequences and chemical modifications for the above screens are provided in FIG. 2 and Table 2. Table 5 provides the SYNGAP1 mRNA fold change for each of the ASOs tested at 120 or 150 nM in the CEK293 and SK-N-AS cells. Data in Table 5 is the highest fold change in either BTEK293 or SK-N-AS cells.

TABLE 5

| ASO | RegRNA | Fold | ASO | RegRNA | Fold | ASO | RegRNA | Fold |
|---|---|---|---|---|---|---|---|---|
| Name | ID | Change | Name | ID | Change | Name | ID | Change |
| CO-9338 | RR93_v1 | 1.321594 | CO-11485 | RR93_v1 | 1.098 | CO-7456 | RR86_v1 | 0.9449606 |
| CO-9339 | RR93_v1 | 1.3706311 | CO-11486 | RR93_v1 | 1.405 | CO-7457 | RR86_v1 | 1.0319805 |
| CO-9340 | RR93_v1 | 1.1504698 | CO-11487 | RR93_v1 | 1.023 | CO-7458 | RR86_v1 | 1.2095657 |
| CO-9341 | RR93_v1 | 1.2625709 | CO-11488 | RR93_v1 | 1.072 | CO-7459 | RR86_v1 | 0.985811 |
| CO-9342 | RR93_v1 | 1.1148151 | CO-11489 | RR93_v1 | 1.003 | CO-7460 | RR86_v1 | 1.0390162 |
| CO-9343 | RR93_v1 | 1.3888901 | CO-11490 | RR93_v1 | 1.315 | CO-7461 | RR86_v1 | 0.904346 |
| CO-9344 | RR93_v1 | 0.9657844 | CO-11491 | RR93_v1 | 1.259 | CO-7462 | RR86_v1 | 0.8664023 |
| CO-9345 | RR93_v1 | 1.2362275 | CO-11492 | RR93_v1 | 1.039 | CO-7463 | RR86_v1 | 1.0854104 |
| CO-9346 | RR93_v1 | 1.1890224 | CO-11493 | RR93_v1 | 0.967 | CO-7464 | RR86_v1 | 0.9973143 |
| CO-9347 | RR93_v1 | 1.2048252 | CO-11494 | RR93_v1 | 1.075 | CO-7465 | RR86_v1 | 0.9350017 |
| CO-9348 | RR93_v1 | 1.2810625 | CO-11495 | RR93_v1 | 0.918 | CO-7466 | RR86_v1 | 0.8167716 |
| CO-9349 | RR93_v1 | 1.2775086 | CO-11496 | RR93_v1 | 1.009 | CO-7467 | RR86_v1 | 1.1587845 |
| CO-9350 | RR93_v1 | 1.0835416 | CO-11497 | RR93_v1 | 1.041 | CO-7468 | RR86_v1 | 0.9602621 |
| CO-9351 | RR93_v1 | 1.3758323 | CO-11498 | RR93_v1 | 1.014 | CO-7469 | RR86_v1 | 0.9481977 |
| CO-9352 | RR93_v1 | 1.1376858 | CO-11499 | RR93_v1 | 1.01 | CO-7470 | RR86_v1 | 1.1200934 |
| CO-9353 | RR93_v1 | 1.2197741 | CO-11500 | RR93_v1 | 1.289 | CO-7471 | RR86_v1 | 1.0447312 |
| CO-9354 | RR93_v1 | 1.1876314 | CO-11501 | RR93_v1 | 1.085 | CO-7472 | RR86_v1 | 1.1077642 |
| CO-9355 | RR93_v1 | 1.2610805 | CO-11502 | RR93_v1 | 1.108 | CO-7473 | RR86_v1 | 1.04298 |
| CO-9356 | RR93_v1 | 1.2775573 | CO-11503 | RR93_v1 | 1.048 | CO-7474 | RR86_v1 | 1.0067661 |
| CO-9357 | RR93_v1 | 1.2064543 | CO-11504 | RR93_v1 | 1.009 | CO-7475 | RR86_v1 | 0.8484672 |
| CO-9358 | RR93_v1 | 1.1944626 | CO-11505 | RR93_v1 | 1.077 | CO-7476 | RR87_v1 | 0.9989343 |
| CO-9359 | RR93_v1 | 1.5521272 | CO-11506 | RR93_v1 | 1.116 | CO-7477 | RR87_v1 | 1.063341 |
| CO-9360 | RR93_v1 | 1.2819913 | CO-11507 | RR93_v1 | 1.192 | CO-7478 | RR87_v1 | 1.0571886 |
| CO-9361 | RR93_v1 | 1.2026502 | CO-11508 | RR93_v1 | 1.267 | CO-7479 | RR87_v1 | 0.9307392 |
| CO-9362 | RR93_v1 | 1.302456 | CO-11509 | RR93_v1 | 1.16 | CO-7480 | RR87_v1 | 1.1291831 |
| CO-9363 | RR93_v1 | 1.1767388 | CO-11510 | RR93_v1 | 1.284 | CO-7481 | RR87_v1 | 1.0592261 |
| CO-9364 | RR93_v1 | 1.2839077 | CO-11511 | RR93_v1 | 0.966 | CO-7482 | RR87_v1 | 1.6736641 |
| CO-9365 | RR93_v1 | 1.2768352 | CO-11512 | RR93_v1 | 1.024 | CO-7483 | RR87_v1 | 0.9840308 |
| CO-9366 | RR93_v1 | 2.0581875 | CO-11513 | RR93_v1 | 0.964 | CO-7484 | RR87_v1 | 1.0044173 |
| CO-9367 | RR93_v1 | 1.9645819 | CO-11514 | RR93_v1 | 1.893 | CO-7485 | RR87_v1 | 0.9125338 |
| CO-9368 | RR93_v1 | 1.2862002 | CO-11515 | RR93_v1 | 1.58 | CO-7486 | RR87_v1 | 0.9283744 |
| CO-9369 | RR93_v1 | 1.7420414 | CO-11516 | RR93_v1 | 1.471 | CO-7487 | RR87_v1 | 0.8363852 |
| CO-9370 | RR93_v1 | 1.790755 | CO-11517 | RR93_v1 | 1.687 | CO-7488 | RR87_v1 | 1.0833093 |
| CO-9371 | RR93_v1 | 1.3136199 | CO-11518 | RR93_v1 | 2.019 | CO-7489 | RR87_v1 | 1.1887636 |
| CO-9372 | RR93_v1 | 1.5815611 | CO-11519 | RR93_v1 | 1.982 | CO-7490 | RR88_v1 | 0.9341973 |
| CO-9373 | RR93_v1 | 2.4613097 | CO-11520 | RR93_v1 | 2.112 | CO-7491 | RR88_v1 | 1.0489649 |
| CO-9374 | RR93_v1 | 1.4548151 | CO-11521 | RR93_v1 | 1.889 | CO-7492 | RR88_v1 | 1.0391064 |
| CO-9375 | RR93_v1 | 1.6152445 | CO-11522 | RR93_v1 | 1.817 | CO-7493 | RR88_v1 | 1.0124646 |
| CO-9376 | RR93_v1 | 1.9087868 | CO-11523 | RR93_v1 | 1.067 | CO-7494 | RR88_v1 | 1.5231282 |
| CO-9377 | RR93_v1 | 1.1746632 | CO-11524 | RR93_v1 | 2.209 | CO-7495 | RR88_v1 | 1.1644063 |
| CO-9378 | RR93_v1 | 1.3066085 | CO-11525 | RR93_v1 | 2.002 | CO-7496 | RR88_v1 | 1.238685 |
| CO-9379 | RR93_v1 | 1.1252958 | CO-11526 | RR93_v1 | 2.078 | CO-7497 | RR88_v1 | 1.2139934 |
| CO-9380 | RR93_v1 | 1.3441474 | CO-11527 | RR93_v1 | 2.421 | CO-7498 | RR88_v1 | 1.3566668 |
| CO-9381 | RR93_v1 | 1.3566714 | CO-11528 | RR93_v1 | 2.557 | CO-7499 | RR88_v1 | 0.9723212 |
| CO-9382 | RR93_v1 | 1.1444834 | CO-11529 | RR93_v1 | 2.257 | CO-7500 | RR88_v1 | 1.1049107 |
| CO-9383 | RR93_v1 | 1.1938737 | CO-11530 | RR93_v1 | 1.908 | CO-7501 | RR88_v1 | 1.2699296 |
| CO-9384 | RR93_v1 | 1.1880869 | CO-11531 | RR93_v1 | 1.953 | CO-7502 | RR88_v1 | 0.9702517 |
| CO-9385 | RR93_v1 | 1.2090633 | CO-11532 | RR93_v1 | 1.947 | CO-7503 | RR88_v1 | 1.0589459 |
| CO-9386 | RR93_v1 | 1.0815572 | CO-11533 | RR93_v1 | 2.188 | CO-7504 | RR88_v1 | 0.9997099 |
| CO-9387 | RR93_v1 | 1.1823235 | CO-11534 | RR93_v1 | 2.207 | CO-7505 | RR88_v1 | 0.9774405 |
| CO-9388 | RR93_v1 | 1.2022095 | CO-11535 | RR93_v1 | 2.078 | CO-7506 | RR88_v1 | 0.9328241 |
| CO-9389 | RR93_v1 | 1.126392 | CO-11536 | RR93_v1 | 1.462 | CO-7507 | RR88_v1 | 1.0555954 |
| CO-9390 | RR93_v1 | 1.1360314 | CO-11537 | RR93_v1 | 1.519 | CO-7508 | RR88_v1 | 0.9813804 |
| CO-9391 | RR93_v1 | 1.1583284 | CO-11538 | RR93_v1 | 1.483 | CO-7509 | RR88_v1 | 0.8658039 |
| CO-9392 | RR93_v1 | 1.2230058 | CO-11539 | RR93_v1 | 1.443 | CO-7510 | RR88_v1 | 0.9170467 |
| CO-9393 | RR93_v1 | 1.2711363 | CO-11540 | RR93_v1 | 1.747 | CO-7511 | RR88_v1 | 0.9914842 |
| CO-9394 | RR93_v1 | 1.3902505 | CO-11541 | RR93_v1 | 1.62 | CO-7512 | RR88_v1 | 1.4082365 |
| CO-9395 | RR93_v1 | 1.012632 | CO-11542 | RR93_v1 | 1.787 | CO-7513 | RR88_v1 | 0.9855844 |
| CO-9396 | RR93_v1 | 1.0814878 | CO-11543 | RR93_v1 | 1.64 | CO-7514 | RR88_v1 | 1.028286 |
| CO-9397 | RR93_v1 | 1.2710926 | CO-11544 | RR93_v1 | 1.565 | CO-7515 | RR88_v1 | 0.9290347 |
| CO-9398 | RR93_v1 | 1.3041249 | CO-11545 | RR93_v1 | 1.129 | CO-7516 | RR88_v1 | 1.1425184 |
| CO-9399 | RR93_v1 | 0.707424 | CO-11546 | RR93_v1 | 1.516 | CO-7517 | RR88_v1 | 0.886103 |
| CO-9400 | RR93_v1 | 1.1224393 | CO-11547 | RR93_v1 | 1.525 | CO-7518 | RR88_v1 | 1.0418982 |
| CO-9401 | RR93_v1 | 1.0500868 | CO-11548 | RR93_v1 | 1.574 | CO-7519 | RR88_v1 | 1.0195556 |
| CO-9402 | RR93_v1 | 0.993377 | CO-11549 | RR93_v1 | 1.513 | CO-7520 | RR88_v1 | 1.0000126 |
| CO-9403 | RR93_v1 | 1.0394972 | CO-11550 | RR93_v1 | 1.438 | CO-7521 | RR88_v1 | 0.996495 |
| CO-9404 | RR93_v1 | 0.9099642 | CO-11551 | RR93_v1 | 1.544 | CO-7522 | RR88_v1 | 0.8529326 |
| CO-9405 | RR93_v1 | 1.1611975 | CO-11552 | RR93_v1 | 1.403 | | | |
| CO-9406 | RR93_v1 | 1.3640809 | CO-11553 | RR93_v1 | 1.264 | CO-7524 | RR88_v1 | 1.2802595 |
| CO-9407 | RR93_v1 | 1.0988679 | CO-11554 | RR93_v1 | 1.309 | CO-7525 | RR88_v1 | 0.9690307 |
| CO-9408 | RR93_v1 | 1.2155807 | CO-11555 | RR93_v1 | 1.513 | CO-10604 | RR86_v1 | 0.943379 |
| CO-9409 | RR93_v1 | 1.1399418 | CO-11556 | RR93_v1 | 1.606 | CO-10605 | RR86_v1 | 1.1428818 |
| CO-9410 | RR93_v1 | 1.0341938 | CO-11557 | RR93_v1 | 1.482 | CO-10606 | RR86_v1 | 0.9547887 |
| CO-9411 | RR93_v1 | 0.9782816 | CO-11558 | RR93_v1 | 1.013 | CO-10607 | RR86_v1 | 1.042436 |
| CO-9412 | RR93_v1 | 1.0786407 | CO-11559 | RR93_v1 | 1.226 | CO-10608 | RR86_v1 | 0.7367796 |
| CO-9413 | RR93_v1 | 0.8585804 | CO-11560 | RR93_v1 | 0.981 | CO-10609 | RR86_v1 | 0.9074972 |
| CO-9414 | RR93_v1 | 1.0130657 | CO-11561 | RR93_v1 | 1.224 | CO-10610 | RR86_v1 | 1.2663714 |
| CO-9415 | RR93_v1 | 1.1754598 | CO-11562 | RR93_v1 | 1.083 | CO-10611 | RR86_v1 | 1.0540569 |
| CO-9416 | RR93_v1 | 1.0307946 | CO-11563 | RR93_v1 | 1.164 | CO-10612 | RR86_v1 | 1.1257978 |
| CO-9417 | RR93_v1 | 1.2610847 | CO-11564 | RR93_v1 | 1.246 | CO-10613 | RR86_v1 | 1.000489 |
| CO-9418 | RR93_v1 | 1.0150563 | CO-11565 | RR93_v1 | 1.133 | CO-10614 | RR86_v1 | 1.470392 |
| CO-9419 | RR93_v1 | 1.1605032 | CO-11566 | RR93_v1 | 1.147 | CO-10615 | RR86_v1 | 1.6432752 |
| CO-9420 | RR93_v1 | 1.0259147 | CO-11567 | RR93_v1 | 1.024 | CO-10616 | RR86_v1 | 1.2661259 |
| CO-9421 | RR93_v1 | 1.0412051 | CO-11568 | RR93_v1 | 1.111 | CO-10617 | RR86_v1 | 1.2149476 |
| CO-9422 | RR93_v1 | 1.0320985 | CO-11569 | RR93_v1 | 1.219 | CO-10618 | RR86_v1 | 1.4933121 |
| CO-9423 | RR93_v1 | 0.9519308 | CO-11570 | RR93_v1 | 1.46 | CO-10619 | RR86_v1 | 1.42294 |
| CO-9424 | RR93_v1 | 1.0312607 | CO-11571 | RR93_v1 | 1.362 | CO-10620 | RR86_v1 | 1.4835377 |
| CO-9425 | RR93_v1 | 1.2115176 | CO-11572 | RR93_v1 | 1.223 | CO-10621 | RR86_v1 | 1.3489807 |
| CO-9426 | RR93_v1 | 1.0959396 | CO-11573 | RR93_v1 | 1.13 | CO-10622 | RR86_v1 | 1.283321 |
| CO-9427 | RR93_v1 | 1.3668122 | CO-11574 | RR93_v1 | 1.04 | CO-10623 | RR86_v1 | 1.3603462 |
| CO-9428 | RR93_v1 | 1.360219 | CO-11575 | RR93_v1 | 1.122 | CO-10624 | RR86_v1 | 1.0883013 |
| CO-9429 | RR93_v1 | 1.1775405 | CO-11576 | RR93_v1 | 1.253 | CO-10625 | RR86_v1 | 1.2365178 |
| CO-9430 | RR93_v1 | 1.2839459 | CO-11577 | RR93_v1 | 1.172 | CO-10626 | RR86_v1 | 1.2080423 |
| CO-9431 | RR93_v1 | 1.1963223 | CO-11578 | RR93_v1 | 1.361 | CO-10627 | RR86_v1 | 0.7432697 |
| CO-9432 | RR93_v1 | 0.9567216 | CO-11579 | RR93_v1 | 1.26 | CO-10628 | RR86_v1 | 0.9995231 |
| CO-9433 | RR93_v1 | 1.1487297 | CO-7426 | RR86_v1 | 1.0288763 | CO-10629 | RR86_v1 | 0.8889495 |
| CO-9434 | RR93_v1 | 0.8242675 | CO-7427 | RR86_v1 | 1.1754702 | CO-10630 | RR86_v1 | 1.3443304 |
| CO-9435 | RR93_v1 | 0.9650148 | CO-7428 | RR86_v1 | 1.0154496 | CO-10631 | RR86_v1 | 1.4537813 |
| CO-9436 | RR93_v1 | 1.0985332 | CO-7429 | RR86_v1 | 1.0081403 | CO-10632 | RR86_v1 | 1.3538474 |
| CO-9437 | RR93_v1 | 1.4831135 | CO-7430 | RR86_v1 | 0.9908796 | CO-10633 | RR86_v1 | 1.3639591 |
| CO-9438 | RR93_v1 | 1.5335774 | CO-7431 | RR86_v1 | 1.2733722 | CO-10634 | RR88_v1 | 1.3080051 |
| CO-9439 | RR93_v1 | 0.66379 | CO-7432 | RR86_v1 | 1.7380756 | CO-10635 | RR88_v1 | 1.3032588 |
| CO-9440 | RR93_v1 | 0.968923 | CO-7433 | RR86_v1 | 1.7766038 | CO-10636 | RR88_v1 | 1.5718849 |
| CO-9441 | RR93_v1 | 1.0276241 | CO-7434 | RR86_v1 | 1.068472 | CO-10637 | RR88_v1 | 1.5657107 |
| CO-9442 | RR93_v1 | 0.9190491 | CO-7435 | RR86_v1 | 1.8628839 | CO-10638 | RR88_v1 | 1.6248555 |
| CO-9443 | RR93_v1 | 1.0212564 | CO-7436 | RR86_v1 | 1.3504051 | CO-10639 | RR88_v1 | 1.3942842 |
| CO-9444 | RR93_v1 | 1.068958 | CO-7437 | RR86_v1 | 1.1638969 | CO-10640 | RR88_v1 | 1.4714194 |
| CO-9445 | RR93_v1 | 1.0122161 | CO-7438 | RR86_v1 | 1.0901726 | CO-10641 | RR88_v1 | 1.3662879 |
| CO-9446 | RR93_v1 | 1.27272 | CO-7439 | RR86_v1 | 1.04526 | CO-10642 | RR88_v1 | 1.207777 |
| CO-9447 | RR93_v1 | 1.0944535 | CO-7440 | RR86_v1 | 0.9528664 | CO-10643 | RR88_v1 | 0.7155983 |
| CO-11470 | RR93_v1 | 1.104 | CO-7441 | RR86_v1 | 1.4767496 | CO-10644 | RR86_v1 | 0.7624614 |
| CO-11471 | RR93_v1 | 1.222 | CO-7442 | RR86_v1 | 1.2390386 | CO-10645 | RR86_v1 | 1.1312052 |
| CO-11472 | RR93_v1 | 1.523 | CO-7443 | RR86_v1 | 1.0569675 | CO-10646 | RR86_v1 | 1.1087194 |
| CO-11473 | RR93_v1 | 1.156 | CO-7444 | RR86_v1 | 1.0135355 | CO-10647 | RR86_v1 | 1.2833403 |
| CO-11474 | RR93_v1 | 1.02 | CO-7445 | RR86_v1 | 0.8286293 | CO-10648 | RR86_v1 | 1.2953941 |
| CO-11475 | RR93_v1 | 1.368 | CO-7446 | RR86_v1 | 1.0410719 | CO-10649 | RR86_v1 | 1.0075258 |
| CO-11476 | RR93_v1 | 1.404 | CO-7447 | RR86_v1 | 1.5447964 | CO-10650 | RR86_v1 | 1.1894634 |
| CO-11477 | RR93_v1 | 1.522 | CO-7448 | RR86_v1 | 1.04163 | CO-10651 | RR88_v1 | 1.3664382 |
| CO-11478 | RR93_v1 | 1.349 | CO-7449 | RR86_v1 | 0.965321 | CO-10652 | RR88_v1 | 1.2517985 |
| CO-11479 | RR93_v1 | 1.378 | CO-7450 | RR86_v1 | 0.9393038 | CO-10653 | RR88_v1 | 1.2148849 |
| CO-11480 | RR93_v1 | 1.382 | CO-7451 | RR86_v1 | 0.9720582 | CO-10654 | RR88_v1 | 1.2079456 |
| CO-11481 | RR93_v1 | 1.426 | CO-7452 | RR86_v1 | 1.0010828 | CO-10655 | RR86_v1 | 0.9305552 |
| CO-11482 | RR93_v1 | 1.355 | CO-7453 | RR86_v1 | 0.9373946 | CO-10656 | RR86_v1 | 1.4071696 |
| CO-11483 | RR93_v1 | 1.423 | CO-7454 | RR86_v1 | 0.9346072 | CO-10657 | RR86_v1 | 1.0344922 |
| CO-11484 | RR93_v1 | 1.362 | CO-7455 | RR86_v1 | 0.9085137 | CO-10658 | RR86_v1 | 0.7174548 |

[0229] Gapmer ASOs CO-7432, CO-7433, CO-7435, CO-7441, CO-7447, CO-7482, and CO-7494, which target the regRNAs RR86, RR87, and RR88, upregulated SYNGAP1 mRNA levels more than 1.4 fold in 1TEK293 cells as compared to the control ASOs CO-1588 and CO-1589.

[0230] As shown in FIGS. 4A, 4B, 4C and FIG. 41D, a dose-dependent increase of SYNGAP1 mRNA in HTEK293 cells was observed after treatment with selected ASOs CO-7435, CO-7447, CO-7494, CO-7512, CO-7432, and CO-7433. In addition, ASOs CO-7432, CO-7433, CO-7435, CO-7436, CO-7447, CO-7482, CO-7494, CO-7498, CO-7512, and CO-7524 increased SYNGAP1 mRNA in SK-N-AS cells. As shown in FIGS. 4E and 4F, a dose-dependent increase of SYNGAP1 mRNA in 1TEK293 cells and SK-N-AS was observed after treatment with selected ASOs CO-9367, CO-9369, CO-9370, CO-9373, and CO-9376.

[0231] A gapmer hotspot at SYNGAP1 chr6:33419695-33419939 was identified between CO-9366 and CO-9376 (FIG. 5). SK-N-AS or HEK293 cells were reverse transfected on Day 0 with 120 nM of selected ASOs. Cells were collected on Day 2 for SYNGAP1 mRNA quantification using qPCR (as described above). Tiled ASOs CO-9366 to CO-9376 covering regRNA RR93 at this hotspot increased SYNGAP1 mRNA in both SK-N-AS and HEK239 cells 1.2- to 2.5-fold as compared to control ASOs CO-1588 and CO-1589 (FIG. 5).

[0232] Additional dose response characterization of this regRNA hotspot in SK-N-AS and HEK293 cells was also performed by reverse transfecting cells with 7.5, 15, 30, 60, and 120 nM of ASOs as previously described. As shown in FIG. 6, the ASOs targeting the regRNA hotspot induced a dose-dependent upregulation of SYNGAP1 mRNA in both SK-N-AS and HEK293 cells.

### Example 2: ASOs Targeting SYNGAP1 regRNA RR86 and RR96 Induce Increased Expression of SYNGAP1 mRNA in iPSC-Differentiated Neurons

[0233] To assess the ability of ASOs targeting hSYGNAP1 regRNAs to modulate the expression of SYNGAP1 in a CNS translational model, the following experiment was performed using human iPSC differentiated neurons. Briefly, human induced pluripotent stem cells (iPSCs) were differentiated into neurons by overexpression of transcription factor Neurogenin-2 through viral transduction as described in Zhang et al. (2013) Neuron 78(5): 785-98, incorporated herein by reference. The differentiated neurons were allowed to mature in culture for 7-10 days, and transfected using Lipofectamine™ 2000 (INVITROGEN) with either 12.5 nM, 25 nM, 50 nM, 100 nM of ASOs targeting the SYNGAP1 regRNAs RR86_v2 and RR93: CO-10645, CO-11528, CO-7432, CO-7435, CO-9367, CO-9369, or CO-9370. SYNGAP1 mRNA was detected using qPCR as described above.

[0234] As shown in FIG. 7, the ASOs targeting RR86v2 and RR93 upregulated SYNGAP1 mRNA by about 1.5 to 2.2-fold as compared to control ASO CO-1588, indicating that targeting these regRNAs can be used to increase the expression of SYNGAP1 in a clinically relevant cell model.

### INCORPORATION BY REFERENCE

[0235] Unless stated to the contrary, the entire disclosure of each of the patent documents and scientific articles referred to herein is incorporated by reference for all purposes.

### EQUIVALENTS

[0236] The disclosure may be embodied in other specific forms without departing from the spirit or essential characteristics thereof. The foregoing embodiments are therefore to be considered in all respects illustrative rather than limiting the disclosure described herein. Scope of the disclosure is thus indicated by the appended claims rather than by the foregoing description, and all changes that come within the meaning and range of equivalency of the claims are intended to be embraced therein.

The application's sequence listing, which the Patent Office published only in electronic form, follows.

SEQUENCE LISTING (4919 sequences)

SEQ ID NO: 1 - RNA, 467 nt, Homo sapiens
  source 1..467: mol_type = genomic RNA
tagtaggagggcacaggcccagggtgtcctcgcaacgggcgtcccggggagctgctgaagtcctccccgctgcagaggaccgagaggcagggcccgggagagaacagcccggtcggagggggtgggccgtcagccgccccggaaagctgcgtttcccggtgattaagtgtagcacccgcccccggtaggtcctgagaggggcgagattagttgggtacttaccatgtgggcctggcacttgcccacatcactttgtgtcttcccaccggccctgcgagggtgggggttgccgtcctcagtttccaggcgggggaaacgggctggaagcgtcactcagctaatagtagtggacctgggactggaactcagatttgctaaggaaccaggcaggttctttcctgttttctgcacgggagcattttaaccagcaattaaagaaaccttatttctaggtaatttttaaaaga

SEQ ID NO: 2 - RNA, 193 nt, Homo sapiens
  source 1..193: mol_type = genomic RNA
gccgcccctcacctgccaatgatgctcttgatctgggaatccttctctgcctgctgctgccttagcctcttctcactctgctccagtcgggcctgatactgcatcaggattttgctggtttgttcttcctgggacagcagcctccgctcatactcttccagcttccggttggacatgtgcagccgctctttca

SEQ ID NO: 3 - RNA, 649 nt, Homo sapiens
  source 1..649: mol_type = genomic RNA
gatccctgcaaatgtaatcaaactaagaagaggccagccatggtatctcattcctgtaatcccagcactttgggaggccgaggtgggtggattgcctgaggtcaggagttcgagccagcctggccaacatagtgaaaccccgtctctaataaaaatacaaaaacaaattagctgggcatagtggcacgtgcctgtaatcccagctactcaggaggctgaggcaggagaatcacttgaacctggaaggcggaggttgcagtgagctgagctcatgccattgcactccaagcctgggaaacaagagcgatattccatctcaaaaaaaagaggccatactgaattagagtggacccttaacccaccttataaaaactggtgtctttatatggagagggagatttggagacacagagatacaggatacagagacacacagaaggaagccagctacatgaagatggaggcagaaattagacggatgcagttataagcccaggaatgccaaggactgctggcaacctccggaagctaggaagaggcaaggaaggattccctgctacagcatcaaagagagcgtggccctgctgataccttgcttttggacttccagcctcctgaactgtgagagaataaatttctgttgttttac

SEQ ID NO: 4 - RNA, 859 nt, Homo sapiens
  source 1..859: mol_type = genomic RNA
aggaggaggagagaggaggagagaggagcagagagaagcagagaggaggagagaggaggaggaggaggagaataagagccaacggcagcagcggcagccgagagagagggggggcgggggagcgagcgagagcgaagagagcaggaggaggaggaggagggagagactctgcagcccccacccctactccgggaggcccagattgtgagagagagagagacccctgactcaaaaacacaccagagagagacagaggtcctaaagatgcagaccccagaccctgagacagagagaccctagacccacagagaaagatacttcaccaccccccactgtggggtaatttgagacacagggccaaaatctagaggaaaagagactcctgatttgaggaaaaaacgaccccagatcccccagagagagaagctcaatatcaaaatctgaaaatccagtctaaaaagggttctccatacctacagatatcttagactccagaccctgagatgatgatttcagggaccaggacctgagacctagactcagaaaaagatgaggcccagattcagaaagagccagatgtagaattagagcttagagaactcagacctagaaagagaccccagactcagatctcagagactgataacttagagacagagacactcctgacttaaggggagatagagacttcagctggtccggagatggacaactcagagacccaaaattcatgaagaagacttcgaaagacctcagagtgcgaccacagaccctgaaacatagaaaccccccaaaccagaagcataaaaggaaactcaatcctaagaaagatctccacacaaatactgaaagacccctc

SEQ ID NO: 5 - RNA, 283 nt, Homo sapiens
  source 1..283: mol_type = genomic RNA
gtaggtcctgagaggggcgagattagttgggtacttaccatgtgggcctggcacttgcccacatcactttgtgtcttcccaccggccctgcgagggtgggggttgccgtcctcagtttccaggcgggggaaacgggctggaagcgtcactcagctaatagtagtggacctgggactggaactcagatttgctaaggaaccaggcaggttctttcctgttttctgcacgggagcattttaaccagcaattaaagaaaccttatttctaggtaatttttaaaaga

SEQ ID NO: 6 - RNA, 906 nt, Homo sapiens
  source 1..906: mol_type = genomic RNA
agagcgaagagagcaggaggaggaggaggagggagagactctgcagcccccacccctactccgggaggcccagattgtgagagagagagagacccctgactcaaaaacacaccagagagagacagaggtcctaaagatgcagaccccagaccctgagacagagagaccctagacccacagagaaagatacttcaccaccccccactgtggggtaatttgagacacagggccaaaatctagaggaaaagagactcctgatttgaggaaaaaacgaccccagatcccccagagagagaagctcaatatcaaaatctgaaaatccagtctaaaaagggttctccatacctacagatatcttagactccagaccctgagatgatgatttcagggaccaggacctgagacctagactcagaaaaagatgaggcccagattcagaaagagccagatgtagaattagagcttagagaactcagacctagaaagagaccccagactcagatctcagagactgataacttagagacagagacactcctgacttaaggggagatagagacttcagctggtccggagatggacaactcagagacccaaaattcatgaagaagacttcgaaagacctcagagtgcgaccacagaccctgaaacatagaaaccccccaaaccagaagcataaaaggaaactcaatcctaagaaagatctccacacaaatactgaaagacccctccgaaatctgtctcagagacaaactccaaactcaaagacagagatctcagggaacctcccctccccacttccctgccctagaacctccgagaggtataaccctgacgtcagcctgggaaactccgaggcatccccaccaccagaccaatgacctcagaccttgaagggaggggaaa

SEQ ID NO: 7 - RNA, 1027 nt, Mus sp.
  source 1..1027: mol_type = genomic RNA
caccgtacctctgaagggggcataggacatcgcggggatgctcccccgatggatggaggctcgagacctgctcatcaggcctgagggggagggggcggggggacggggggagaaaaagaagagagaaagagggggagagaaagggggagaaggaggaggtggaggaggaggaggaggaggagagaggaggagagaggagcggagaggagcagagaggaggagagaggaggaggaggaggagaataagagccaacggcagcagcggcagcagagagagggggggcgggggaagcgagctagagaagagagagcaggaggaggagggagagactgcagcccccacccctacccagggagacccggaaaaggagagaacgagggacccctgactcatacacaccagggaagtcccgtagaagctgacccaagaccctcagacagaccccagacccagagaaagatactcaccacctcaccccccccccacctccatactcaacaaattgggtctcacagatccaaatctagaaggaaagagacctctgagctcagaccccaccccctaaattaaagaaaggagtcagggaccagaatatgagactctagtgtcagcaaggttctccagacccatgttaatcttattcgaaccctggacttgtagtttgggagacccaaaacagagacctagacccaaagaaaaagatgaagccaatattagaaagtgccccaggccagaattaaattttagaatctagctagaggtaagaaaccccacattcgtatctcaaagaaactgcaaacttggggatgaaggaggagacattcggctgacccaaagatgaagatgaccacatagagatctaaaatacattacatctgaaagatgtgagttagtgaccgattgcgaggttcaatttcctgaaacaactccccaggtaacccagaccctaggaagggcccaaatattggacccccacccccacaggacccaaatattggacccccaacccctcacctacacacacaa

SEQ ID NO: 8-9 - skipped (2 entries)

SEQ ID NO: 10 - RNA, 20 nt, synthetic construct
  source 1..20: mol_type = other RNA
acttcagcagctccccggga

SEQ ID NO: 11 - RNA, 20 nt, synthetic construct
  source 1..20: mol_type = other RNA
tgcctctcggtcctctgcag

SEQ ID NO: 12 - RNA, 20 nt, synthetic construct
  source 1..20: mol_type = other RNA
acttcagcagctccccggga

SEQ ID NO: 13 - RNA, 20 nt, synthetic construct
  source 1..20: mol_type = other RNA
tgcctctcggtcctctgcag

SEQ ID NO: 14 - RNA, 20 nt, synthetic construct
  source 1..20: mol_type = other RNA
aatctcgcccctctcaggac

SEQ ID NO: 15 - RNA, 20 nt, synthetic construct
  source 1..20: mol_type = other RNA
ccaactaatctcgcccctct

SEQ ID NO: 16 - RNA, 20 nt, synthetic construct
  source 1..20: mol_type = other RNA
taagtacccaactaatctcg

SEQ ID NO: 17 - RNA, 20 nt, synthetic construct
  source 1..20: mol_type = other RNA
caggcccacatggtaagtac

SEQ ID NO: 18 - RNA, 20 nt, synthetic construct
  source 1..20: mol_type = other RNA
gcaagtgccaggcccacatg

SEQ ID NO: 19 - RNA, 20 nt, synthetic construct
  source 1..20: mol_type = other RNA
tgggaagacacaaagtgatg

SEQ ID NO: 20 - RNA, 20 nt, synthetic construct
  source 1..20: mol_type = other RNA
actgaggacggcaaccccca

SEQ ID NO: 21 - RNA, 20 nt, synthetic construct
  source 1..20: mol_type = other RNA
ctggaaactgaggacggcaa

SEQ ID NO: 22 - RNA, 20 nt, synthetic construct
  source 1..20: mol_type = other RNA
tttcccccgcctggaaactg

SEQ ID NO: 23 - RNA, 20 nt, synthetic construct
  source 1..20: mol_type = other RNA
gtgacgcttccagcccgttt

SEQ ID NO: 24 - RNA, 20 nt, synthetic construct
  source 1..20: mol_type = other RNA
tagctgagtgacgcttccag

SEQ ID NO: 25 - RNA, 20 nt, synthetic construct
  source 1..20: mol_type = other RNA
tactattagctgagtgacgc

SEQ ID NO: 26 - RNA, 20 nt, synthetic construct
  source 1..20: mol_type = other RNA
ggtccactactattagctga

SEQ ID NO: 27 - RNA, 20 nt, synthetic construct
  source 1..20: mol_type = other RNA
gtcccaggtccactactatt

SEQ ID NO: 28 - RNA, 20 nt, synthetic construct
  source 1..20: mol_type = other RNA
gttccagtcccaggtccact

SEQ ID NO: 29 - RNA, 20 nt, synthetic construct
  source 1..20: mol_type = other RNA
aatctgagttccagtcccag

SEQ ID NO: 30 - RNA, 20 nt, synthetic construct
  source 1..20: mol_type = other RNA
ccttagcaaatctgagttcc

SEQ ID NO: 31 - RNA, 20 nt, synthetic construct
  source 1..20: mol_type = other RNA
gcctggttccttagcaaatc

SEQ ID NO: 32 - RNA, 20 nt, synthetic construct
  source 1..20: mol_type = other RNA
gtgcagaaaacaggaaagaa

SEQ ID NO: 33 - RNA, 20 nt, synthetic construct
  source 1..20: mol_type = other RNA
gctcccgtgcagaaaacagg

SEQ ID NO: 34 - RNA, 20 nt, synthetic construct
  source 1..20: mol_type = other RNA
tggttaaaatgctcccgtgc

SEQ ID NO: 35 - RNA, 20 nt, synthetic construct
  source 1..20: mol_type = other RNA
aattgctggttaaaatgctc

SEQ ID NO: 36 - RNA, 20 nt, synthetic construct
  source 1..20: mol_type = other RNA
aaggtttctttaattgctgg

SEQ ID NO: 37 - RNA, 20 nt, synthetic construct
  source 1..20: mol_type = other RNA
aatctcgcccctctcaggac

SEQ ID NO: 38 - RNA, 20 nt, synthetic construct
  source 1..20: mol_type = other RNA
ccaactaatctcgcccctct

SEQ ID NO: 39 - RNA, 20 nt, synthetic construct
  source 1..20: mol_type = other RNA
taagtacccaactaatctcg

SEQ ID NO: 40 - RNA, 20 nt, synthetic construct
  source 1..20: mol_type = other RNA
caggcccacatggtaagtac

SEQ ID NO: 41 - RNA, 20 nt, synthetic construct
  source 1..20: mol_type = other RNA
gcaagtgccaggcccacatg

SEQ ID NO: 42 - RNA, 20 nt, synthetic construct
  source 1..20: mol_type = other RNA
tgggaagacacaaagtgatg

SEQ ID NO: 43 - RNA, 20 nt, synthetic construct
  source 1..20: mol_type = other RNA
actgaggacggcaaccccca

SEQ ID NO: 44 - RNA, 20 nt, synthetic construct
  source 1..20: mol_type = other RNA
ctggaaactgaggacggcaa

SEQ ID NO: 45 - RNA, 20 nt, synthetic construct
  source 1..20: mol_type = other RNA
tttcccccgcctggaaactg

SEQ ID NO: 46 - RNA, 20 nt, synthetic construct
  source 1..20: mol_type = other RNA
gtgacgcttccagcccgttt

SEQ ID NO: 47 - RNA, 20 nt, synthetic construct
  source 1..20: mol_type = other RNA
tagctgagtgacgcttccag

SEQ ID NO: 48 - RNA, 20 nt, synthetic construct
  source 1..20: mol_type = other RNA
tactattagctgagtgacgc

SEQ ID NO: 49 - RNA, 20 nt, synthetic construct
  source 1..20: mol_type = other RNA
ggtccactactattagctga

SEQ ID NO: 50 - RNA, 20 nt, synthetic construct
  source 1..20: mol_type = other RNA
gtcccaggtccactactatt

SEQ ID NO: 51 - RNA, 20 nt, synthetic construct
  source 1..20: mol_type = other RNA
gttccagtcccaggtccact

SEQ ID NO: 52 - RNA, 20 nt, synthetic construct
  source 1..20: mol_type = other RNA
aatctgagttccagtcccag

SEQ ID NO: 53 - RNA, 20 nt, synthetic construct
  source 1..20: mol_type = other RNA
ccttagcaaatctgagttcc

SEQ ID NO: 54 - RNA, 20 nt, synthetic construct
  source 1..20: mol_type = other RNA
gcctggttccttagcaaatc

SEQ ID NO: 55 - RNA, 20 nt, synthetic construct
  source 1..20: mol_type = other RNA
gtgcagaaaacaggaaagaa

SEQ ID NO: 56 - RNA, 20 nt, synthetic construct
  source 1..20: mol_type = other RNA
gctcccgtgcagaaaacagg

SEQ ID NO: 57 - RNA, 20 nt, synthetic construct
  source 1..20: mol_type = other RNA
tggttaaaatgctcccgtgc

SEQ ID NO: 58 - RNA, 20 nt, synthetic construct
  source 1..20: mol_type = other RNA
aattgctggttaaaatgctc

SEQ ID NO: 59 - RNA, 20 nt, synthetic construct
  source 1..20: mol_type = other RNA
aaggtttctttaattgctgg

SEQ ID NO: 60 - RNA, 20 nt, synthetic construct
  source 1..20: mol_type = other RNA
gcagcaggcagagaaggatt

SEQ ID NO: 61 - RNA, 20 nt, synthetic construct
  source 1..20: mol_type = other RNA
gtcccaggaagaacaaacca

SEQ ID NO: 62 - RNA, 20 nt, synthetic construct
  source 1..20: mol_type = other RNA
gctgctgtcccaggaagaac

SEQ ID NO: 63 - RNA, 20 nt, synthetic construct
  source 1..20: mol_type = other RNA
ctggaagagtatgagcggag

SEQ ID NO: 64 - RNA, 20 nt, synthetic construct
  source 1..20: mol_type = other RNA
cggaagctggaagagtatga

SEQ ID NO: 65 - RNA, 20 nt, synthetic construct
  source 1..20: mol_type = other RNA
tccaaccggaagctggaaga

SEQ ID NO: 66 - RNA, 20 nt, synthetic construct
  source 1..20: mol_type = other RNA
ggctgcacatgtccaaccgg

SEQ ID NO: 67 - RNA, 20 nt, synthetic construct
  source 1..20: mol_type = other RNA
gcagcaggcagagaaggatt

SEQ ID NO: 68 - RNA, 20 nt, synthetic construct
  source 1..20: mol_type = other RNA
gtcccaggaagaacaaacca

SEQ ID NO: 69 - RNA, 20 nt, synthetic construct
  source 1..20: mol_type = other RNA
gctgctgtcccaggaagaac

SEQ ID NO: 70 - RNA, 20 nt, synthetic construct
  source 1..20: mol_type = other RNA
ctggaagagtatgagcggag

SEQ ID NO: 71 - RNA, 20 nt, synthetic construct
  source 1..20: mol_type = other RNA
cggaagctggaagagtatga

SEQ ID NO: 72 - RNA, 20 nt, synthetic construct
  source 1..20: mol_type = other RNA
tccaaccggaagctggaaga

SEQ ID NO: 73 - RNA, 20 nt, synthetic construct
  source 1..20: mol_type = other RNA
ggctgcacatgtccaaccgg

SEQ ID NO: 74 - RNA, 20 nt, synthetic construct
  source 1..20: mol_type = other RNA
ggaatgagataccatggctg

SEQ ID NO: 75 - RNA, 20 nt, synthetic construct
  source 1..20: mol_type = other RNA
tcagtatggcctcttttttt

SEQ ID NO: 76 - RNA, 20 nt, synthetic construct
  source 1..20: mol_type = other RNA
tctaattcagtatggcctct

SEQ ID NO: 77 - RNA, 20 nt, synthetic construct
  source 1..20: mol_type = other RNA
gttaagggtccactctaatt

SEQ ID NO: 78 - RNA, 20 nt, synthetic construct
  source 1..20: mol_type = other RNA
tataaggtgggttaagggtc

SEQ ID NO: 79 - RNA, 20 nt, synthetic construct
  source 1..20: mol_type = other RNA
gacaccagtttttataaggt

SEQ ID NO: 80 - RNA, 20 nt, synthetic construct
  source 1..20: mol_type = other RNA
ccatataaagacaccagttt

SEQ ID NO: 81 - RNA, 20 nt, synthetic construct
  source 1..20: mol_type = other RNA
ctccctctccatataaagac

SEQ ID NO: 82 - RNA, 20 nt, synthetic construct
  source 1..20: mol_type = other RNA
tatctctgtgtctccaaatc

SEQ ID NO: 83 - RNA, 20 nt, synthetic construct
  source 1..20: mol_type = other RNA
gtatcctgtatctctgtgtc

SEQ ID NO: 84 - RNA, 20 nt, synthetic construct
  source 1..20: mol_type = other RNA
gtgtgtctctgtatcctgta

SEQ ID NO: 85 - RNA, 20 nt, synthetic construct
  source 1..20: mol_type = other RNA
gtagctggcttccttctgtg

SEQ ID NO: 86 - RNA, 20 nt, synthetic construct
  source 1..20: mol_type = other RNA
cttcatgtagctggcttcct

SEQ ID NO: 87 - RNA, 20 nt, synthetic construct
  source 1..20: mol_type = other RNA
ctccatcttcatgtagctgg

SEQ ID NO: 88 - RNA, 20 nt, synthetic construct
  source 1..20: mol_type = other RNA
gcatccgtctaatttctgcc

SEQ ID NO: 89 - RNA, 20 nt, synthetic construct
  source 1..20: mol_type = other RNA
cttataactgcatccgtcta

SEQ ID NO: 90 - RNA, 20 nt, synthetic construct
  source 1..20: mol_type = other RNA
gctgtagcagggaatccttc

SEQ ID NO: 91 - RNA, 20 nt, synthetic construct
  source 1..20: mol_type = other RNA
gccacgctctctttgatgct

SEQ ID NO: 92 - RNA, 20 nt, synthetic construct
  source 1..20: mol_type = other RNA
ggaatgagataccatggctg

SEQ ID NO: 93 - RNA, 20 nt, synthetic construct
  source 1..20: mol_type = other RNA
tcagtatggcctcttttttt

SEQ ID NO: 94 - RNA, 20 nt, synthetic construct
  source 1..20: mol_type = other RNA
tctaattcagtatggcctct

SEQ ID NO: 95 - RNA, 20 nt, synthetic construct
  source 1..20: mol_type = other RNA
gttaagggtccactctaatt

SEQ ID NO: 96 - RNA, 20 nt, synthetic construct
  source 1..20: mol_type = other RNA
tataaggtgggttaagggtc

SEQ ID NO: 97 - RNA, 20 nt, synthetic construct
  source 1..20: mol_type = other RNA
gacaccagtttttataaggt

SEQ ID NO: 98 - RNA, 20 nt, synthetic construct
  source 1..20: mol_type = other RNA
ccatataaagacaccagttt

SEQ ID NO: 99 - RNA, 20 nt, synthetic construct
  source 1..20: mol_type = other RNA
ctccctctccatataaagac

SEQ ID NO: 100 - RNA, 20 nt, synthetic construct
  source 1..20: mol_type = other RNA
tatctctgtgtctccaaatc

SEQ ID NO: 101 - RNA, 20 nt, synthetic construct
  source 1..20: mol_type = other RNA
gtatcctgtatctctgtgtc

SEQ ID NO: 102 - RNA, 20 nt, synthetic construct
  source 1..20: mol_type = other RNA
gtgtgtctctgtatcctgta

SEQ ID NO: 103 - RNA, 20 nt, synthetic construct
  source 1..20: mol_type = other RNA
gtagctggcttccttctgtg

SEQ ID NO: 104 - RNA, 20 nt, synthetic construct
  source 1..20: mol_type = other RNA
cttcatgtagctggcttcct

SEQ ID NO: 105 - RNA, 20 nt, synthetic construct
  source 1..20: mol_type = other RNA
ctccatcttcatgtagctgg

SEQ ID NO: 106 - RNA, 20 nt, synthetic construct
  source 1..20: mol_type = other RNA
gcatccgtctaatttctgcc

SEQ ID NO: 107 - RNA, 20 nt, synthetic construct
  source 1..20: mol_type = other RNA
cttataactgcatccgtcta

SEQ ID NO: 108 - RNA, 20 nt, synthetic construct
  source 1..20: mol_type = other RNA
gctgtagcagggaatccttc

SEQ ID NO: 109 - RNA, 20 nt, synthetic construct
  source 1..20: mol_type = other RNA
gccacgctctctttgatgct

SEQ ID NO: 110 - RNA, 20 nt, synthetic construct
  source 1..20: mol_type = other RNA
cgttggctcttattctcctc

SEQ ID NO: 111 - RNA, 20 nt, synthetic construct
  source 1..20: mol_type = other RNA
ctctctggtgtgtttttgag

SEQ ID NO: 112 - RNA, 20 nt, synthetic construct
  source 1..20: mol_type = other RNA
tgcatctttaggacctctgt

SEQ ID NO: 113 - RNA, 20 nt, synthetic construct
  source 1..20: mol_type = other RNA
ggtggtgaagtatctttctc

SEQ ID NO: 114 - RNA, 20 nt, synthetic construct
  source 1..20: mol_type = other RNA
gtctcaaattaccccacagt

SEQ ID NO: 115 - RNA, 20 nt, synthetic construct
  source 1..20: mol_type = other RNA
agattttggccctgtgtctc

SEQ ID NO: 116 - RNA, 20 nt, synthetic construct
  source 1..20: mol_type = other RNA
gagtctcttttcctctagat

SEQ ID NO: 117 - RNA, 20 nt, synthetic construct
  source 1..20: mol_type = other RNA
ggtcgttttttcctcaaatc

SEQ ID NO: 118 - RNA, 20 nt, synthetic construct
  source 1..20: mol_type = other RNA
tgatattgagcttctctctc

SEQ ID NO: 119 - RNA, 20 nt, synthetic construct
  source 1..20: mol_type = other RNA
gtaggtatggagaacccttt

SEQ ID NO: 120 - RNA, 20 nt, synthetic construct
  source 1..20: mol_type = other RNA
ggagtctaagatatctgtag

SEQ ID NO: 121 - RNA, 20 nt, synthetic construct
  source 1..20: mol_type = other RNA
gagtctaggtctcaggtcct

SEQ ID NO: 122 - RNA, 20 nt, synthetic construct
  source 1..20: mol_type = other RNA
gctctaattctacatctggc

SEQ ID NO: 123 - RNA, 20 nt, synthetic construct
  source 1..20: mol_type = other RNA
ctaggtctgagttctctaag

SEQ ID NO: 124 - RNA, 20 nt, synthetic construct
  source 1..20: mol_type = other RNA
gtctctaagttatcagtctc

SEQ ID NO: 125 - RNA, 20 nt, synthetic construct
  source 1..20: mol_type = other RNA
taagtcaggagtgtctctgt

SEQ ID NO: 126 - RNA, 20 nt, synthetic construct
  source 1..20: mol_type = other RNA
gtctctatctccccttaagt

SEQ ID NO: 127 - RNA, 20 nt, synthetic construct
  source 1..20: mol_type = other RNA
atctccggaccagctgaagt

SEQ ID NO: 128 - RNA, 20 nt, synthetic construct
  source 1..20: mol_type = other RNA
gtctctgagttgtccatctc

SEQ ID NO: 129 - RNA, 20 nt, synthetic construct
  source 1..20: mol_type = other RNA
tcttcatgaattttgggtct

SEQ ID NO: 130 - RNA, 20 nt, synthetic construct
  source 1..20: mol_type = other RNA
cgcactctgaggtctttcga

SEQ ID NO: 131 - RNA, 20 nt, synthetic construct
  source 1..20: mol_type = other RNA
gggtttctatgtttcagggt

SEQ ID NO: 132 - RNA, 20 nt, synthetic construct
  source 1..20: mol_type = other RNA
cttttatgcttctggtttgg

SEQ ID NO: 133 - RNA, 20 nt, synthetic construct
  source 1..20: mol_type = other RNA
gtgtggagatctttcttagg

SEQ ID NO: 134 - RNA, 20 nt, synthetic construct
  source 1..20: mol_type = other RNA
ggtctttcagtatttgtgtg

SEQ ID NO: 135 - RNA, 20 nt, synthetic construct
  source 1..20: mol_type = other RNA
gttggctcttattctcctcc

SEQ ID NO: 136 - RNA, 20 nt, synthetic construct
  source 1..20: mol_type = other RNA
gctctcttcgctctcgctcg

SEQ ID NO: 137 - RNA, 20 nt, synthetic construct
  source 1..20: mol_type = other RNA
ctgcagagtctctccctcct

SEQ ID NO: 138 - RNA, 20 nt, synthetic construct
  source 1..20: mol_type = other RNA
ctgtctctctctggtgtgtt

SEQ ID NO: 139 - RNA, 20 nt, synthetic construct
  source 1..20: mol_type = other RNA
ggacctctgtctctctctgg

SEQ ID NO: 140 - RNA, 20 nt, synthetic construct
  source 1..20: mol_type = other RNA
gtctagggtctctctgtctc

SEQ ID NO: 141 - RNA, 20 nt, synthetic construct
  source 1..20: mol_type = other RNA
tgtgggtctagggtctctct

SEQ ID NO: 142 - RNA, 20 nt, synthetic construct
  source 1..20: mol_type = other RNA
ctttctctgtgggtctaggg

SEQ ID NO: 143 - RNA, 20 nt, synthetic construct
  source 1..20: mol_type = other RNA
gaagtatctttctctgtggg

SEQ ID NO: 144 - RNA, 20 nt, synthetic construct
  source 1..20: mol_type = other RNA
gggtggtgaagtatctttct

SEQ ID NO: 145 - RNA, 20 nt, synthetic construct
  source 1..20: mol_type = other RNA
ggccctgtgtctcaaattac

SEQ ID NO: 146 - RNA, 20 nt, synthetic construct
  source 1..20: mol_type = other RNA
gattttggccctgtgtctca

SEQ ID NO: 147 - RNA, 20 nt, synthetic construct
  source 1..20: mol_type = other RNA
cctctagattttggccctgt

SEQ ID NO: 148 - RNA, 20 nt, synthetic construct
  source 1..20: mol_type = other RNA
ctgtaggtatggagaaccct

SEQ ID NO: 149 - RNA, 20 nt, synthetic construct
  source 1..20: mol_type = other RNA
tctggctctttctgaatctg

SEQ ID NO: 150 - RNA, 20 nt, synthetic construct
  source 1..20: mol_type = other RNA
ctacatctggctctttctga

SEQ ID NO: 151 - RNA, 20 nt, synthetic construct
  source 1..20: mol_type = other RNA
gggtctctttctaggtctga

SEQ ID NO: 152 - RNA, 20 nt, synthetic construct
  source 1..20: mol_type = other RNA
gtcaggagtgtctctgtctc

SEQ ID NO: 153 - RNA, 20 nt, synthetic construct
  source 1..20: mol_type = other RNA
gctgaagtctctatctcccc

SEQ ID NO: 154 - RNA, 20 nt, synthetic construct
  source 1..20: mol_type = other RNA
tctccggaccagctgaagtc

SEQ ID NO: 155 - RNA, 20 nt, synthetic construct
  source 1..20: mol_type = other RNA
gggtctctgagttgtccatc

SEQ ID NO: 156 - RNA, 20 nt, synthetic construct
  source 1..20: mol_type = other RNA
ggtcgcactctgaggtcttt

SEQ ID NO: 157 - RNA, 20 nt, synthetic construct
  source 1..20: mol_type = other RNA
gggtctgtggtcgcactctg

SEQ ID NO: 158 - RNA, 20 nt, synthetic construct
  source 1..20: mol_type = other RNA
gtttcagggtctgtggtcgc

SEQ ID NO: 159 - RNA, 20 nt, synthetic construct
  source 1..20: mol_type = other RNA
tctatgtttcagggtctgtg

SEQ ID NO: 160 - RNA, 20 nt, synthetic construct
  source 1..20: mol_type = other RNA
ttttcagattttgatattga

SEQ ID NO: 161 - RNA, 20 nt, synthetic construct
  source 1..20: mol_type = other RNA
cctgaaatcatcatctcagg

SEQ ID NO: 162 - RNA, 20 nt, synthetic construct
  source 1..20: mol_type = other RNA
aggattgagtttccttttat

SEQ ID NO: 163 - RNA, 20 nt, synthetic construct
  source 1..20: mol_type = other RNA
gagatctttcttaggattga

SEQ ID NO: 164 - RNA, 20 nt, synthetic construct
  source 1..20: mol_type = other RNA
ctctgagacagatttcggag

SEQ ID NO: 165 - RNA, 20 nt, synthetic construct
  source 1..20: mol_type = other RNA
cgttggctcttattctcctc

SEQ ID NO: 166 - RNA, 20 nt, synthetic construct
  source 1..20: mol_type = other RNA
ctctctggtgtgtttttgag

SEQ ID NO: 167 - RNA, 20 nt, synthetic construct
  source 1..20: mol_type = other RNA
tgcatctttaggacctctgt

SEQ ID NO: 168 - RNA, 20 nt, synthetic construct
  source 1..20: mol_type = other RNA
ggtggtgaagtatctttctc

SEQ ID NO: 169 - RNA, 20 nt, synthetic construct
  source 1..20: mol_type = other RNA
gtctcaaattaccccacagt

SEQ ID NO: 170 - RNA, 20 nt, synthetic construct
  source 1..20: mol_type = other RNA
agattttggccctgtgtctc

SEQ ID NO: 171 - RNA, 20 nt, synthetic construct
  source 1..20: mol_type = other RNA
gagtctcttttcctctagat

SEQ ID NO: 172 - RNA, 20 nt, synthetic construct
  source 1..20: mol_type = other RNA
ggtcgttttttcctcaaatc

SEQ ID NO: 173 - RNA, 20 nt, synthetic construct
  source 1..20: mol_type = other RNA
tgatattgagcttctctctc

SEQ ID NO: 174 - RNA, 20 nt, synthetic construct
  source 1..20: mol_type = other RNA
gtaggtatggagaacccttt

SEQ ID NO: 175 - RNA, 20 nt, synthetic construct
  source 1..20: mol_type = other RNA
ggagtctaagatatctgtag

SEQ ID NO: 176 - RNA, 20 nt, synthetic construct
  source 1..20: mol_type = other RNA
gagtctaggtctcaggtcct

SEQ ID NO: 177 - RNA, 20 nt, synthetic construct
  source 1..20: mol_type = other RNA
gctctaattctacatctggc

SEQ ID NO: 178 - RNA, 20 nt, synthetic construct
  source 1..20: mol_type = other RNA
ctaggtctgagttctctaag

SEQ ID NO: 179 - RNA, 20 nt, synthetic construct
  source 1..20: mol_type = other RNA
gtctctaagttatcagtctc

SEQ ID NO: 180 - RNA, 20 nt, synthetic construct
  source 1..20: mol_type = other RNA
taagtcaggagtgtctctgt

SEQ ID NO: 181 - RNA, 20 nt, synthetic construct
  source 1..20: mol_type = other RNA
gtctctatctccccttaagt

SEQ ID NO: 182 - RNA, 20 nt, synthetic construct
  source 1..20: mol_type = other RNA
atctccggaccagctgaagt

SEQ ID NO: 183 - RNA, 20 nt, synthetic construct
  source 1..20: mol_type = other RNA
gtctctgagttgtccatctc

SEQ ID NO: 184 - RNA, 20 nt, synthetic construct
  source 1..20: mol_type = other RNA
tcttcatgaattttgggtct

SEQ ID NO: 185 - RNA, 20 nt, synthetic construct
  source 1..20: mol_type = other RNA
cgcactctgaggtctttcga

SEQ ID NO: 186 - RNA, 20 nt, synthetic construct
  source 1..20: mol_type = other RNA
gggtttctatgtttcagggt

SEQ ID NO: 187 - RNA, 20 nt, synthetic construct
  source 1..20: mol_type = other RNA
cttttatgcttctggtttgg

SEQ ID NO: 188 - RNA, 20 nt, synthetic construct
  source 1..20: mol_type = other RNA
gtgtggagatctttcttagg

SEQ ID NO: 189 - RNA, 20 nt, synthetic construct
  source 1..20: mol_type = other RNA
ggtctttcagtatttgtgtg

SEQ ID NO: 190 - RNA, 20 nt, synthetic construct
  source 1..20: mol_type = other RNA
gttggctcttattctcctcc

SEQ ID NO: 191 - RNA, 20 nt, synthetic construct
  source 1..20: mol_type = other RNA
gctctcttcgctctcgctcg

SEQ ID NO: 192 - RNA, 20 nt, synthetic construct
  source 1..20: mol_type = other RNA
ctgcagagtctctccctcct

SEQ ID NO: 193 - RNA, 20 nt, synthetic construct
  source 1..20: mol_type = other RNA
ctgtctctctctggtgtgtt

SEQ ID NO: 194 - RNA, 20 nt, synthetic construct
  source 1..20: mol_type = other RNA
ggacctctgtctctctctgg

SEQ ID NO: 195 - RNA, 20 nt, synthetic construct
  source 1..20: mol_type = other RNA
gtctagggtctctctgtctc

SEQ ID NO: 196 - RNA, 20 nt, synthetic construct
  source 1..20: mol_type = other RNA
tgtgggtctagggtctctct

SEQ ID NO: 197 - RNA, 20 nt, synthetic construct
  source 1..20: mol_type = other RNA
ctttctctgtgggtctaggg

SEQ ID NO: 198 - RNA, 20 nt, synthetic construct
  source 1..20: mol_type = other RNA
gaagtatctttctctgtggg

SEQ ID NO: 199 - RNA, 20 nt, synthetic construct
  source 1..20: mol_type = other RNA
gggtggtgaagtatctttct

SEQ ID NO: 200 - RNA, 20 nt, synthetic construct
  source 1..20: mol_type = other RNA
ggccctgtgtctcaaattac

SEQ ID NO: 201 - RNA, 20 nt, synthetic construct
  source 1..20: mol_type = other RNA
gattttggccctgtgtctca

SEQ ID NO: 202 - RNA, 20 nt, synthetic construct
  source 1..20: mol_type = other RNA
cctctagattttggccctgt

SEQ ID NO: 203 - RNA, 20 nt, synthetic construct
  source 1..20: mol_type = other RNA
ctgtaggtatggagaaccct

SEQ ID NO: 204 - RNA, 20 nt, synthetic construct
  source 1..20: mol_type = other RNA
tctggctctttctgaatctg

SEQ ID NO: 205 - RNA, 20 nt, synthetic construct
  source 1..20: mol_type = other RNA
ctacatctggctctttctga

SEQ ID NO: 206 - RNA, 20 nt, synthetic construct
  source 1..20: mol_type = other RNA
gggtctctttctaggtctga

SEQ ID NO: 207 - RNA, 20 nt, synthetic construct
  source 1..20: mol_type = other RNA
gtcaggagtgtctctgtctc

SEQ ID NO: 208 - RNA, 20 nt, synthetic construct
  source 1..20: mol_type = other RNA
gctgaagtctctatctcccc

SEQ ID NO: 209 - RNA, 20 nt, synthetic construct
  source 1..20: mol_type = other RNA
tctccggaccagctgaagtc

SEQ ID NO: 210 - RNA, 20 nt, synthetic construct
  source 1..20: mol_type = other RNA
gggtctctgagttgtccatc

SEQ ID NO: 211 - RNA, 20 nt, synthetic construct
  source 1..20: mol_type = other RNA
ggtcgcactctgaggtcttt

SEQ ID NO: 212 - RNA, 20 nt, synthetic construct
  source 1..20: mol_type = other RNA
gggtctgtggtcgcactctg

SEQ ID NO: 213 - RNA, 20 nt, synthetic construct
  source 1..20: mol_type = other RNA
gtttcagggtctgtggtcgc

SEQ ID NO: 214 - RNA, 20 nt, synthetic construct
  source 1..20: mol_type = other RNA
tctatgtttcagggtctgtg

SEQ ID NO: 215 - RNA, 20 nt, synthetic construct
  source 1..20: mol_type = other RNA
ttttcagattttgatattga

SEQ ID NO: 216 - RNA, 20 nt, synthetic construct
  source 1..20: mol_type = other RNA
cctgaaatcatcatctcagg

SEQ ID NO: 217 - RNA, 20 nt, synthetic construct
  source 1..20: mol_type = other RNA
aggattgagtttccttttat

SEQ ID NO: 218 - RNA, 20 nt, synthetic construct
  source 1..20: mol_type = other RNA
gagatctttcttaggattga

SEQ ID NO: 219 - RNA, 20 nt, synthetic construct
  source 1..20: mol_type = other RNA
ctctgagacagatttcggag

SEQ ID NO: 220 - RNA, 20 nt, synthetic construct
  source 1..20: mol_type = other RNA
gcaagtgccaggcccacatg

SEQ ID NO: 221 - RNA, 20 nt, synthetic construct
  source 1..20: mol_type = other RNA
gcaagtgccaggcccacatg

SEQ ID NO: 222 - RNA, 20 nt, synthetic construct
  source 1..20: mol_type = other RNA
gcaagtgccaggcccacatg

SEQ ID NO: 223 - RNA, 20 nt, synthetic construct
  source 1..20: mol_type = other RNA
gcaagtgccaggcccacatg

SEQ ID NO: 224 - RNA, 20 nt, synthetic construct
  source 1..20: mol_type = other RNA
gcaagtgccaggcccacatg

SEQ ID NO: 225 - RNA, 20 nt, synthetic construct
  source 1..20: mol_type = other RNA
gcaagtgccaggcccacatg

SEQ ID NO: 226 - RNA, 20 nt, synthetic construct
  source 1..20: mol_type = other RNA
gcaagtgccaggcccacatg

SEQ ID NO: 227 - RNA, 20 nt, synthetic construct
  source 1..20: mol_type = other RNA
gcaagtgccaggcccacatg

SEQ ID NO: 228 - RNA, 22 nt, synthetic construct
  source 1..22: mol_type = other RNA
ggcaagtgccaggcccacatgg

SEQ ID NO: 229 - RNA, 16 nt, synthetic construct
  source 1..16: mol_type = other RNA
aagtgccaggcccaca

SEQ ID NO: 230 - RNA, 20 nt, synthetic construct
  source 1..20: mol_type = other RNA
tgggaagacacaaagtgatg

SEQ ID NO: 231 - RNA, 20 nt, synthetic construct
  source 1..20: mol_type = other RNA
tgggaagacacaaagtgatg

SEQ ID NO: 232 - RNA, 20 nt, synthetic construct
  source 1..20: mol_type = other RNA
tgggaagacacaaagtgatg

SEQ ID NO: 233 - RNA, 20 nt, synthetic construct
  source 1..20: mol_type = other RNA
tgggaagacacaaagtgatg

SEQ ID NO: 234 - RNA, 20 nt, synthetic construct
  source 1..20: mol_type = other RNA
tgggaagacacaaagtgatg

SEQ ID NO: 235 - RNA, 20 nt, synthetic construct
  source 1..20: mol_type = other RNA
tgggaagacacaaagtgatg

SEQ ID NO: 236 - RNA, 20 nt, synthetic construct
  source 1..20: mol_type = other RNA
tgggaagacacaaagtgatg

SEQ ID NO: 237 - RNA, 20 nt, synthetic construct
  source 1..20: mol_type = other RNA
tgggaagacacaaagtgatg

SEQ ID NO: 238 - RNA, 22 nt, synthetic construct
  source 1..22: mol_type = other RNA
gtgggaagacacaaagtgatgt

SEQ ID NO: 239 - RNA, 16 nt, synthetic construct
  source 1..16: mol_type = other RNA
ggaagacacaaagtga

SEQ ID NO: 240 - RNA, 20 nt, synthetic construct
  source 1..20: mol_type = other RNA
gctcccgtgcagaaaacagg

SEQ ID NO: 241 - RNA, 20 nt, synthetic construct
  source 1..20: mol_type = other RNA
gctcccgtgcagaaaacagg

SEQ ID NO: 242 - RNA, 20 nt, synthetic construct
  source 1..20: mol_type = other RNA
gctcccgtgcagaaaacagg

SEQ ID NO: 243 - RNA, 20 nt, synthetic construct
  source 1..20: mol_type = other RNA
gctcccgtgcagaaaacagg

SEQ ID NO: 244 - RNA, 20 nt, synthetic construct
  source 1..20: mol_type = other RNA
gctcccgtgcagaaaacagg

SEQ ID NO: 245 - RNA, 20 nt, synthetic construct
  source 1..20: mol_type = other RNA
gctcccgtgcagaaaacagg

SEQ ID NO: 246 - RNA, 20 nt, synthetic construct
  source 1..20: mol_type = other RNA
gctcccgtgcagaaaacagg

SEQ ID NO: 247 - RNA, 20 nt, synthetic construct
  source 1..20: mol_type = other RNA
gctcccgtgcagaaaacagg

SEQ ID NO: 248 - RNA, 22 nt, synthetic construct
  source 1..22: mol_type = other RNA
tgctcccgtgcagaaaacagga

SEQ ID NO: 249 - skipped

SEQ ID NO: 250 - RNA, 16 nt, synthetic construct
  source 1..16: mol_type = other RNA
tcccgtgcagaaaaca

SEQ ID NO: 251 - RNA, 20 nt, synthetic construct
  source 1..20: mol_type = other RNA
tataaggtgggttaagggtc

SEQ ID NO: 252 - RNA, 20 nt, synthetic construct
  source 1..20: mol_type = other RNA
tataaggtgggttaagggtc

SEQ ID NO: 253 - RNA, 20 nt, synthetic construct
  source 1..20: mol_type = other RNA
tataaggtgggttaagggtc

SEQ ID NO: 254 - RNA, 20 nt, synthetic construct
  source 1..20: mol_type = other RNA
tataaggtgggttaagggtc

SEQ ID NO: 255 - RNA, 20 nt, synthetic construct
  source 1..20: mol_type = other RNA
tataaggtgggttaagggtc

SEQ ID NO: 256 - RNA, 20 nt, synthetic construct
  source 1..20: mol_type = other RNA
tataaggtgggttaagggtc

SEQ ID NO: 257 - RNA, 20 nt, synthetic construct
  source 1..20: mol_type = other RNA
tataaggtgggttaagggtc

SEQ ID NO: 258 - RNA, 20 nt, synthetic construct
  source 1..20: mol_type = other RNA
tataaggtgggttaagggtc

SEQ ID NO: 259 - RNA, 22 nt, synthetic construct
  source 1..22: mol_type = other RNA
ttataaggtgggttaagggtcc

SEQ ID NO: 260 - RNA, 16 nt, synthetic construct
  source 1..16: mol_type = other RNA
taaggtgggttaaggg

SEQ ID NO: 261 - RNA, 20 nt, synthetic construct
  source 1..20: mol_type = other RNA
ccaggcccacatggtaagta

SEQ ID NO: 262 - RNA, 20 nt, synthetic construct
  source 1..20: mol_type = other RNA
caagtgccaggcccacatgg

SEQ ID NO: 263 - RNA, 20 nt, synthetic construct
  source 1..20: mol_type = other RNA
gggaagacacaaagtgatgt

SEQ ID NO: 264 - RNA, 20 nt, synthetic construct
  source 1..20: mol_type = other RNA
cggtgggaagacacaaagtg

SEQ ID NO: 265 - RNA, 20 nt, synthetic construct
  source 1..20: mol_type = other RNA
cgtgcagaaaacaggaaaga

SEQ ID NO: 266 - RNA, 20 nt, synthetic construct
  source 1..20: mol_type = other RNA
cccgtgcagaaaacaggaaa

SEQ ID NO: 267 - RNA, 20 nt, synthetic construct
  source 1..20: mol_type = other RNA
tgctcccgtgcagaaaacag

SEQ ID NO: 268 - RNA, 20 nt, synthetic construct
  source 1..20: mol_type = other RNA
gggttaagggtccactctaa

SEQ ID NO: 269 - RNA, 20 nt, synthetic construct
  source 1..20: mol_type = other RNA
taaggtgggttaagggtcca

SEQ ID NO: 270 - RNA, 20 nt, synthetic construct
  source 1..20: mol_type = other RNA
ttttataaggtgggttaagg

SEQ ID NO: 271 - RNA, 20 nt, synthetic construct
  source 1..20: mol_type = other RNA
cagtttttataaggtgggtt

SEQ ID NO: 272 - RNA, 20 nt, synthetic construct
  source 1..20: mol_type = other RNA
caagtgccaggcccacatgg

SEQ ID NO: 273 - RNA, 20 nt, synthetic construct
  source 1..20: mol_type = other RNA
gggaagacacaaagtgatgt

SEQ ID NO: 274 - RNA, 20 nt, synthetic construct
  source 1..20: mol_type = other RNA
tgctcccgtgcagaaaacag

SEQ ID NO: 275 - RNA, 20 nt, synthetic construct
  source 1..20: mol_type = other RNA
taaggtgggttaagggtcca

SEQ ID NO: 276 - RNA, 20 nt, synthetic construct
  source 1..20: mol_type = other RNA
gcaagtgccaggcccacatg

SEQ ID NO: 277 - RNA, 20 nt, synthetic construct
  source 1..20: mol_type = other RNA
tgggaagacacaaagtgatg

SEQ ID NO: 278 - RNA, 20 nt, synthetic construct
  source 1..20: mol_type = other RNA
gctcccgtgcagaaaacagg

SEQ ID NO: 279 - RNA, 20 nt, synthetic construct
  source 1..20: mol_type = other RNA
tataaggtgggttaagggtc

SEQ ID NO: 280 - RNA, 20 nt, synthetic construct
  source 1..20: mol_type = other RNA
ctctggtgtgtttttgagtc

SEQ ID NO: 281 - RNA, 20 nt, synthetic construct
  source 1..20: mol_type = other RNA
tctctctggtgtgtttttga

SEQ ID NO: 282 - RNA, 20 nt, synthetic construct
  source 1..20: mol_type = other RNA
aggacctctgtctctctctg

SEQ ID NO: 283 - RNA, 20 nt, synthetic construct
  source 1..20: mol_type = other RNA
ctttaggacctctgtctctc

SEQ ID NO: 284 - RNA, 20 nt, synthetic construct
  source 1..20: mol_type = other RNA
catctttaggacctctgtct

SEQ ID NO: 285 - RNA, 20 nt, synthetic construct
  source 1..20: mol_type = other RNA
agggtctctctgtctcaggg

SEQ ID NO: 286 - RNA, 20 nt, synthetic construct
  source 1..20: mol_type = other RNA
ctagggtctctctgtctcag

SEQ ID NO: 287 - RNA, 20 nt, synthetic construct
  source 1..20: mol_type = other RNA
ggtctagggtctctctgtct

SEQ ID NO: 288 - RNA, 20 nt, synthetic construct
  source 1..20: mol_type = other RNA
tgggtctagggtctctctgt

SEQ ID NO: 289 - RNA, 20 nt, synthetic construct
  source 1..20: mol_type = other RNA
ctgtgggtctagggtctctc

SEQ ID NO: 290 - RNA, 20 nt, synthetic construct
  source 1..20: mol_type = other RNA
ctctgtgggtctagggtctc

SEQ ID NO: 291 - RNA, 20 nt, synthetic construct
  source 1..20: mol_type = other RNA
ttctctgtgggtctagggtc

SEQ ID NO: 292 - RNA, 20 nt, synthetic construct
  source 1..20: mol_type = other RNA
atctttctctgtgggtctag

SEQ ID NO: 293 - RNA, 20 nt, synthetic construct
  source 1..20: mol_type = other RNA
aagtatctttctctgtgggt

SEQ ID NO: 294 - RNA, 20 nt, synthetic construct
  source 1..20: mol_type = other RNA
gtgaagtatctttctctgtg

SEQ ID NO: 295 - RNA, 20 nt, synthetic construct
  source 1..20: mol_type = other RNA
tggtgaagtatctttctctg

SEQ ID NO: 296 - RNA, 20 nt, synthetic construct
  source 1..20: mol_type = other RNA
ctcaaattaccccacagtgg

SEQ ID NO: 297 - RNA, 20 nt, synthetic construct
  source 1..20: mol_type = other RNA
gtgtctcaaattaccccaca

SEQ ID NO: 298 - RNA, 20 nt, synthetic construct
  source 1..20: mol_type = other RNA
ctgtgtctcaaattacccca

SEQ ID NO: 299 - RNA, 20 nt, synthetic construct
  source 1..20: mol_type = other RNA
ccctgtgtctcaaattaccc

SEQ ID NO: 300 - RNA, 20 nt, synthetic construct
  source 1..20: mol_type = other RNA
ttggccctgtgtctcaaatt

SEQ ID NO: 301 - RNA, 20 nt, synthetic construct
  source 1..20: mol_type = other RNA
ttttggccctgtgtctcaaa

SEQ ID NO: 302 - RNA, 20 nt, synthetic construct
  source 1..20: mol_type = other RNA
ctagattttggccctgtgtc

SEQ ID NO: 303 - RNA, 20 nt, synthetic construct
  source 1..20: mol_type = other RNA
ttcctctagattttggccct

SEQ ID NO: 304 - RNA, 20 nt, synthetic construct
  source 1..20: mol_type = other RNA
cttttcctctagattttggc

SEQ ID NO: 305 - RNA, 20 nt, synthetic construct
  source 1..20: mol_type = other RNA
agtctcttttcctctagatt

SEQ ID NO: 306 - RNA, 20 nt, synthetic construct
  source 1..20: mol_type = other RNA
caaatcaggagtctcttttc

SEQ ID NO: 307 - RNA, 20 nt, synthetic construct
  source 1..20: mol_type = other RNA
cctcaaatcaggagtctctt

SEQ ID NO: 308 - RNA, 20 nt, synthetic construct
  source 1..20: mol_type = other RNA
cgttttttcctcaaatcagg

SEQ ID NO: 309 - RNA, 20 nt, synthetic construct
  source 1..20: mol_type = other RNA
gtcgttttttcctcaaatca

SEQ ID NO: 310 - RNA, 20 nt, synthetic construct
  source 1..20: mol_type = other RNA
gatattgagcttctctctct

SEQ ID NO: 311 - RNA, 20 nt, synthetic construct
  source 1..20: mol_type = other RNA
tttgatattgagcttctctc

SEQ ID NO: 312 - RNA, 20 nt, synthetic construct
  source 1..20: mol_type = other RNA
gattttgatattgagcttct

SEQ ID NO: 313 - RNA, 20 nt, synthetic construct
  source 1..20: mol_type = other RNA
tcagattttgatattgagct

SEQ ID NO: 314 - RNA, 20 nt, synthetic construct
  source 1..20: mol_type = other RNA
actggattttcagattttga

SEQ ID NO: 315 - RNA, 20 nt, synthetic construct
  source 1..20: mol_type = other RNA
tagactggattttcagattt

SEQ ID NO: 316 - RNA, 20 nt, synthetic construct
  source 1..20: mol_type = other RNA
ctttttagactggattttca

SEQ ID NO: 317 - RNA, 20 nt, synthetic construct
  source 1..20: mol_type = other RNA
accctttttagactggattt

SEQ ID NO: 318 - RNA, 20 nt, synthetic construct
  source 1..20: mol_type = other RNA
agaaccctttttagactgga

SEQ ID NO: 319 - RNA, 20 nt, synthetic construct
  source 1..20: mol_type = other RNA
tggagaaccctttttagact

SEQ ID NO: 320 - RNA, 20 nt, synthetic construct
  source 1..20: mol_type = other RNA
gtatggagaaccctttttag

SEQ ID NO: 321 - RNA, 20 nt, synthetic construct
  source 1..20: mol_type = other RNA
gatatctgtaggtatggaga

SEQ ID NO: 322 - RNA, 20 nt, synthetic construct
  source 1..20: mol_type = other RNA
taagatatctgtaggtatgg

SEQ ID NO: 323 - RNA, 20 nt, synthetic construct
  source 1..20: mol_type = other RNA
agtctaagatatctgtaggt

SEQ ID NO: 324 - RNA, 20 nt, synthetic construct
  source 1..20: mol_type = other RNA
ggacctctgtctctctctgg

SEQ ID NO: 325 - RNA, 20 nt, synthetic construct
  source 1..20: mol_type = other RNA
ggacctctgtctctctctgg

SEQ ID NO: 326 - RNA, 20 nt, synthetic construct
  source 1..20: mol_type = other RNA
ggacctctgtctctctctgg

SEQ ID NO: 327 - RNA, 20 nt, synthetic construct
  source 1..20: mol_type = other RNA
ggacctctgtctctctctgg

SEQ ID NO: 328 - RNA, 20 nt, synthetic construct
  source 1..20: mol_type = other RNA
ggacctctgtctctctctgg

SEQ ID NO: 329 - RNA, 20 nt, synthetic construct
  source 1..20: mol_type = other RNA
ggacctctgtctctctctgg

SEQ ID NO: 330 - RNA, 20 nt, synthetic construct
  source 1..20: mol_type = other RNA
ggacctctgtctctctctgg

SEQ ID NO: 331 - RNA, 20 nt, synthetic construct
  source 1..20: mol_type = other RNA
ggacctctgtctctctctgg

SEQ ID NO: 332 - RNA, 20 nt, synthetic construct
  source 1..20: mol_type = other RNA
ggacctctgtctctctctgg

SEQ ID NO: 333 - RNA, 20 nt, synthetic construct
  source 1..20: mol_type = other RNA
ggacctctgtctctctctgg

SEQ ID NO: 334 - RNA, 22 nt, synthetic construct
  source 1..22: mol_type = other RNA
aggacctctgtctctctctggt

SEQ ID NO: 335 - RNA, 22 nt, synthetic construct
  source 1..22: mol_type = other RNA
aggacctctgtctctctctggt

SEQ ID NO: 336 - RNA, 22 nt, synthetic construct
  source 1..22: mol_type = other RNA
aggacctctgtctctctctggt

SEQ ID NO: 337 - RNA, 22 nt, synthetic construct
  source 1..22: mol_type = other RNA
aggacctctgtctctctctggt

SEQ ID NO: 338 - RNA, 22 nt, synthetic construct
  source 1..22: mol_type = other RNA
aggacctctgtctctctctggt

SEQ ID NO: 339 - RNA, 22 nt, synthetic construct
  source 1..22: mol_type = other RNA
aggacctctgtctctctctggt

SEQ ID NO: 340 - RNA, 24 nt, synthetic construct
  source 1..24: mol_type = other RNA
taggacctctgtctctctctggtg

SEQ ID NO: 341 - RNA, 24 nt, synthetic construct
  source 1..24: mol_type = other RNA
taggacctctgtctctctctggtg

SEQ ID NO: 342 - RNA, 24 nt, synthetic construct
  source 1..24: mol_type = other RNA
taggacctctgtctctctctggtg

SEQ ID NO: 343 - RNA, 24 nt, synthetic construct
  source 1..24: mol_type = other RNA
taggacctctgtctctctctggtg

SEQ ID NO: 344 - RNA, 24 nt, synthetic construct
  source 1..24: mol_type = other RNA
taggacctctgtctctctctggtg

SEQ ID NO: 345 - RNA, 24 nt, synthetic construct
  source 1..24: mol_type = other RNA
taggacctctgtctctctctggtg

SEQ ID NO: 346 - RNA, 20 nt, synthetic construct
  source 1..20: mol_type = other RNA
ggccctgtgtctcaaattac

SEQ ID NO: 347 - RNA, 20 nt, synthetic construct
  source 1..20: mol_type = other RNA
ggccctgtgtctcaaattac

SEQ ID NO: 348 - RNA, 20 nt, synthetic construct
  source 1..20: mol_type = other RNA
ggccctgtgtctcaaattac

SEQ ID NO: 349 - RNA, 20 nt, synthetic construct
  source 1..20: mol_type = other RNA
ggccctgtgtctcaaattac

SEQ ID NO: 350 - RNA, 20 nt, synthetic construct
  source 1..20: mol_type = other RNA
ggccctgtgtctcaaattac

SEQ ID NO: 351 - RNA, 20 nt, synthetic construct
  source 1..20: mol_type = other RNA
ggccctgtgtctcaaattac

SEQ ID NO: 352 - RNA, 20 nt, synthetic construct
  source 1..20: mol_type = other RNA
ggccctgtgtctcaaattac

SEQ ID NO: 353 - RNA, 20 nt, synthetic construct
  source 1..20: mol_type = other RNA
ggccctgtgtctcaaattac

SEQ ID NO: 354 - RNA, 20 nt, synthetic construct
  source 1..20: mol_type = other RNA
ggccctgtgtctcaaattac

SEQ ID NO: 355 - RNA, 20 nt, synthetic construct
  source 1..20: mol_type = other RNA
ggccctgtgtctcaaattac

SEQ ID NO: 356 - RNA, 22 nt, synthetic construct
  source 1..22: mol_type = other RNA
tggccctgtgtctcaaattacc

SEQ ID NO: 357 - RNA, 22 nt, synthetic construct
  source 1..22: mol_type = other RNA
tggccctgtgtctcaaattacc

SEQ ID NO: 358 - RNA, 22 nt, synthetic construct
  source 1..22: mol_type = other RNA
tggccctgtgtctcaaattacc

SEQ ID NO: 359 - RNA, 22 nt, synthetic construct
  source 1..22: mol_type = other RNA
tggccctgtgtctcaaattacc

SEQ ID NO: 360 - RNA, 22 nt, synthetic construct
  source 1..22: mol_type = other RNA
tggccctgtgtctcaaattacc

SEQ ID NO: 361 - RNA, 22 nt, synthetic construct
  source 1..22: mol_type = other RNA
tggccctgtgtctcaaattacc

SEQ ID NO: 362 - RNA, 24 nt, synthetic construct
  source 1..24: mol_type = other RNA
ttggccctgtgtctcaaattaccc

SEQ ID NO: 363 - RNA, 24 nt, synthetic construct
  source 1..24: mol_type = other RNA
ttggccctgtgtctcaaattaccc

SEQ ID NO: 364 - RNA, 24 nt, synthetic construct
  source 1..24: mol_type = other RNA
ttggccctgtgtctcaaattaccc

SEQ ID NO: 365 - RNA, 24 nt, synthetic construct
  source 1..24: mol_type = other RNA
ttggccctgtgtctcaaattaccc

SEQ ID NO: 366 - RNA, 24 nt, synthetic construct
  source 1..24: mol_type = other RNA
ttggccctgtgtctcaaattaccc

SEQ ID NO: 367 - RNA, 24 nt, synthetic construct
  source 1..24: mol_type = other RNA
ttggccctgtgtctcaaattaccc

SEQ ID NO: 368 - RNA, 20 nt, synthetic construct
  source 1..20: mol_type = other RNA
ctgtaggtatggagaaccct

SEQ ID NO: 369 - RNA, 20 nt, synthetic construct
  source 1..20: mol_type = other RNA
ctgtaggtatggagaaccct

SEQ ID NO: 370 - RNA, 20 nt, synthetic construct
  source 1..20: mol_type = other RNA
ctgtaggtatggagaaccct

SEQ ID NO: 371 - RNA, 20 nt, synthetic construct
  source 1..20: mol_type = other RNA
ctgtaggtatggagaaccct

SEQ ID NO: 372 - RNA, 20 nt, synthetic construct
  source 1..20: mol_type = other RNA
ctgtaggtatggagaaccct

SEQ ID NO: 373 - RNA, 20 nt, synthetic construct
  source 1..20: mol_type = other RNA
ctgtaggtatggagaaccct

SEQ ID NO: 374 - RNA, 20 nt, synthetic construct
  source 1..20: mol_type = other RNA
ctgtaggtatggagaaccct

SEQ ID NO: 375 - RNA, 20 nt, synthetic construct
  source 1..20: mol_type = other RNA
ctgtaggtatggagaaccct

SEQ ID NO: 376 - RNA, 20 nt, synthetic construct
  source 1..20: mol_type = other RNA
ctgtaggtatggagaaccct

SEQ ID NO: 377 - RNA, 20 nt, synthetic construct
  source 1..20: mol_type = other RNA
ctgtaggtatggagaaccct

SEQ ID NO: 378 - RNA, 22 nt, synthetic construct
  source 1..22: mol_type = other RNA
tctgtaggtatggagaaccctt

SEQ ID NO: 379 - RNA, 22 nt, synthetic construct
  source 1..22: mol_type = other RNA
tctgtaggtatggagaaccctt

SEQ ID NO: 380 - RNA, 22 nt, synthetic construct
  source 1..22: mol_type = other RNA
tctgtaggtatggagaaccctt

SEQ ID NO: 381 - RNA, 22 nt, synthetic construct
  source 1..22: mol_type = other RNA
tctgtaggtatggagaaccctt

SEQ ID NO: 382 - RNA, 22 nt, synthetic construct
  source 1..22: mol_type = other RNA
tctgtaggtatggagaaccctt

SEQ ID NO: 383 - RNA, 22 nt, synthetic construct
  source 1..22: mol_type = other RNA
tctgtaggtatggagaaccctt

SEQ ID NO: 384 - RNA, 24 nt, synthetic construct
  source 1..24: mol_type = other RNA
atctgtaggtatggagaacccttt

SEQ ID NO: 385 - RNA, 24 nt, synthetic construct
  source 1..24: mol_type = other RNA
atctgtaggtatggagaacccttt

SEQ ID NO: 386 - RNA, 24 nt, synthetic construct
  source 1..24: mol_type = other RNA
atctgtaggtatggagaacccttt

SEQ ID NO: 387 - RNA, 24 nt, synthetic construct
  source 1..24: mol_type = other RNA
atctgtaggtatggagaacccttt

SEQ ID NO: 388 - RNA, 24 nt, synthetic construct
  source 1..24: mol_type = other RNA
atctgtaggtatggagaacccttt

SEQ ID NO: 389 - RNA, 24 nt, synthetic construct
  source 1..24: mol_type = other RNA
atctgtaggtatggagaacccttt

SEQ ID NO: 390 - RNA, 20 nt, synthetic construct
  source 1..20: mol_type = other RNA
ctttctctgtgggtctaggg

SEQ ID NO: 391 - RNA, 20 nt, synthetic construct
  source 1..20: mol_type = other RNA
ctttctctgtgggtctaggg

SEQ ID NO: 392 - RNA, 20 nt, synthetic construct
  source 1..20: mol_type = other RNA
ctttctctgtgggtctaggg

SEQ ID NO: 393 - RNA, 20 nt, synthetic construct
  source 1..20: mol_type = other RNA
ctttctctgtgggtctaggg

SEQ ID NO: 394 - RNA, 20 nt, synthetic construct
  source 1..20: mol_type = other RNA
ctttctctgtgggtctaggg

SEQ ID NO: 395 - RNA, 20 nt, synthetic construct
  source 1..20: mol_type = other RNA
ctttctctgtgggtctaggg

SEQ ID NO: 396 - RNA, 20 nt, synthetic construct
  source 1..20: mol_type = other RNA
ctttctctgtgggtctaggg

SEQ ID NO: 397 - RNA, 20 nt, synthetic construct
  source 1..20: mol_type = other RNA
ctttctctgtgggtctaggg

SEQ ID NO: 398 - RNA, 20 nt, synthetic construct
  source 1..20: mol_type = other RNA
ctttctctgtgggtctaggg

SEQ ID NO: 399 - RNA, 20 nt, synthetic construct
  source 1..20: mol_type = other RNA
ctttctctgtgggtctaggg

SEQ ID NO: 400 - RNA, 20 nt, synthetic construct
  source 1..20: mol_type = other RNA
ctttctctgtgggtctaggg

SEQ ID NO: 401 - RNA, 20 nt, synthetic construct
  source 1..20: mol_type = other RNA
ctttctctgtgggtctaggg

SEQ ID NO: 402 - RNA, 20 nt, synthetic construct
  source 1..20: mol_type = other RNA
ctttctctgtgggtctaggg

SEQ ID NO: 403 - RNA, 20 nt, synthetic construct
  source 1..20: mol_type = other RNA
ctttctctgtgggtctaggg

SEQ ID NO: 404 - RNA, 22 nt, synthetic construct
  source 1..22: mol_type = other RNA
tctttctctgtgggtctagggt

SEQ ID NO: 405 - RNA, 22 nt, synthetic construct
  source 1..22: mol_type = other RNA
tctttctctgtgggtctagggt

SEQ ID NO: 406 - RNA, 22 nt, synthetic construct
  source 1..22: mol_type = other RNA
tctttctctgtgggtctagggt

SEQ ID NO: 407 - RNA, 22 nt, synthetic construct
  source 1..22: mol_type = other RNA
tctttctctgtgggtctagggt

SEQ ID NO: 408 - RNA, 22 nt, synthetic construct
  source 1..22: mol_type = other RNA
tctttctctgtgggtctagggt

SEQ ID NO: 409 - RNA, 22 nt, synthetic construct
  source 1..22: mol_type = other RNA
tctttctctgtgggtctagggt

SEQ ID NO: 410 - RNA, 24 nt, synthetic construct
  source 1..24: mol_type = other RNA
atctttctctgtgggtctagggtc

SEQ ID NO: 411 - RNA, 24 nt, synthetic construct
  source 1..24: mol_type = other RNA
atctttctctgtgggtctagggtc

SEQ ID NO: 412 - RNA, 24 nt, synthetic construct
  source 1..24: mol_type = other RNA
atctttctctgtgggtctagggtc

SEQ ID NO: 413 - RNA, 24 nt, synthetic construct
  source 1..24: mol_type = other RNA
atctttctctgtgggtctagggtc

SEQ ID NO: 414 - RNA, 24 nt, synthetic construct
  source 1..24: mol_type = other RNA
atctttctctgtgggtctagggtc

SEQ ID NO: 415 - RNA, 24 nt, synthetic construct
  source 1..24: mol_type = other RNA
atctttctctgtgggtctagggtc

SEQ ID NO: 416 - RNA, 20 nt, synthetic construct
  source 1..20: mol_type = other RNA
ggacctctgtctctctctgg

SEQ ID NO: 417 - RNA, 20 nt, synthetic construct
  source 1..20: mol_type = other RNA
ctgtaggtatggagaaccct

SEQ ID NO: 418 - RNA, 20 nt, synthetic construct
  source 1..20: mol_type = other RNA
ctgtaggtatggagaaccct

SEQ ID NO: 419 - RNA, 20 nt, synthetic construct
  source 1..20: mol_type = other RNA
ctgtaggtatggagaaccct

SEQ ID NO: 420 - RNA, 20 nt, synthetic construct
  source 1..20: mol_type = other RNA
ctgtaggtatggagaaccct

SEQ ID NO: 421 - RNA, 20 nt, synthetic construct
  source 1..20: mol_type = other RNA
ctgtaggtatggagaaccct

SEQ ID NO: 422 - RNA, 20 nt, synthetic construct
  source 1..20: mol_type = other RNA
ctgtaggtatggagaaccct

SEQ ID NO: 423 - RNA, 20 nt, synthetic construct
  source 1..20: mol_type = other RNA
ctgtaggtatggagaaccct

SEQ ID NO: 424 - RNA, 20 nt, synthetic construct
  source 1..20: mol_type = other RNA
ggacctctgtctctctctgg

SEQ ID NO: 425 - RNA, 20 nt, synthetic construct
  source 1..20: mol_type = other RNA
ggacctctgtctctctctgg

SEQ ID NO: 426 - RNA, 20 nt, synthetic construct
  source 1..20: mol_type = other RNA
ggacctctgtctctctctgg

SEQ ID NO: 427 - RNA, 20 nt, synthetic construct
  source 1..20: mol_type = other RNA
ggacctctgtctctctctgg

SEQ ID NO: 428 - RNA, 20 nt, synthetic construct
  source 1..20: mol_type = other RNA
ggacctctgtctctctctgg

SEQ ID NO: 429 - RNA, 20 nt, synthetic construct
  source 1..20: mol_type = other RNA
ggacctctgtctctctctgg

SEQ ID NO: 430 - RNA, 20 nt, synthetic construct
  source 1..20: mol_type = other RNA
ggctcttattctcctcctcc

SEQ ID NO: 431 - RNA, 20 nt, synthetic construct
  source 1..20: mol_type = other RNA
ttggctcttattctcctcct

SEQ ID NO: 432 - RNA, 20 nt, synthetic construct
  source 1..20: mol_type = other RNA
ccgttggctcttattctcct

SEQ ID NO: 433 - RNA, 20 nt, synthetic construct
  source 1..20: mol_type = other RNA
tgccgttggctcttattctc

SEQ ID NO: 434 - RNA, 20 nt, synthetic construct
  source 1..20: mol_type = other RNA
gctgccgttggctcttattc

SEQ ID NO: 435 - RNA, 20 nt, synthetic construct
  source 1..20: mol_type = other RNA
ctgctgccgttggctcttat

SEQ ID NO: 436 - RNA, 20 nt, synthetic construct
  source 1..20: mol_type = other RNA
cgctgctgccgttggctctt

SEQ ID NO: 437 - RNA, 20 nt, synthetic construct
  source 1..20: mol_type = other RNA
ggctcttattctcctcctcc

SEQ ID NO: 438 - RNA, 20 nt, synthetic construct
  source 1..20: mol_type = other RNA
ttggctcttattctcctcct

SEQ ID NO: 439 - RNA, 20 nt, synthetic construct
  source 1..20: mol_type = other RNA
ccgttggctcttattctcct

SEQ ID NO: 440 - RNA, 20 nt, synthetic construct
  source 1..20: mol_type = other RNA
tgccgttggctcttattctc

SEQ ID NO: 441 - RNA, 20 nt, synthetic construct
  source 1..20: mol_type = other RNA
gctgccgttggctcttattc

SEQ ID NO: 442 - RNA, 20 nt, synthetic construct
  source 1..20: mol_type = other RNA
ctgctgccgttggctcttat

SEQ ID NO: 443 - RNA, 20 nt, synthetic construct
  source 1..20: mol_type = other RNA
cgctgctgccgttggctctt

SEQ ID NO: 444 - RNA, 20 nt, synthetic construct
  source 1..20: mol_type = other RNA
ctggtgtgtttttgagtcag

SEQ ID NO: 445 - RNA, 20 nt, synthetic construct
  source 1..20: mol_type = other RNA
tctggtgtgtttttgagtca

SEQ ID NO: 446 - RNA, 20 nt, synthetic construct
  source 1..20: mol_type = other RNA
tctctggtgtgtttttgagt

SEQ ID NO: 447 - RNA, 20 nt, synthetic construct
  source 1..20: mol_type = other RNA
atctttaggacctctgtctc

SEQ ID NO: 448 - RNA, 20 nt, synthetic construct
  source 1..20: mol_type = other RNA
ggtctgcatctttaggacct

SEQ ID NO: 449 - RNA, 20 nt, synthetic construct
  source 1..20: mol_type = other RNA
gggtctgcatctttaggacc

SEQ ID NO: 450 - RNA, 20 nt, synthetic construct
  source 1..20: mol_type = other RNA
tctagggtctctctgtctca

SEQ ID NO: 451 - RNA, 20 nt, synthetic construct
  source 1..20: mol_type = other RNA
gggtctagggtctctctgtc

SEQ ID NO: 452 - RNA, 20 nt, synthetic construct
  source 1..20: mol_type = other RNA
gtgggtctagggtctctctg

SEQ ID NO: 453 - RNA, 20 nt, synthetic construct
  source 1..20: mol_type = other RNA
tctgtgggtctagggtctct

SEQ ID NO: 454 - RNA, 20 nt, synthetic construct
  source 1..20: mol_type = other RNA
tctctgtgggtctagggtct

SEQ ID NO: 455 - RNA, 20 nt, synthetic construct
  source 1..20: mol_type = other RNA
tttctctgtgggtctagggt

SEQ ID NO: 456 - RNA, 20 nt, synthetic construct
  source 1..20: mol_type = other RNA
tgaagtatctttctctgtgg

SEQ ID NO: 457 - RNA, 20 nt, synthetic construct
  source 1..20: mol_type = other RNA
ggtgaagtatctttctctgt

SEQ ID NO: 458 - RNA, 20 nt, synthetic construct
  source 1..20: mol_type = other RNA
gtggtgaagtatctttctct

SEQ ID NO: 459 - RNA, 20 nt, synthetic construct
  source 1..20: mol_type = other RNA
tcaaattaccccacagtggg

SEQ ID NO: 460 - RNA, 20 nt, synthetic construct
  source 1..20: mol_type = other RNA
tctcaaattaccccacagtg

SEQ ID NO: 461 - RNA, 20 nt, synthetic construct
  source 1..20: mol_type = other RNA
tgtctcaaattaccccacag

SEQ ID NO: 462 - RNA, 20 nt, synthetic construct
  source 1..20: mol_type = other RNA
tgtgtctcaaattaccccac

SEQ ID NO: 463 - RNA, 20 nt, synthetic construct
  source 1..20: mol_type = other RNA
cctgtgtctcaaattacccc

SEQ ID NO: 464 - RNA, 20 nt, synthetic construct
  source 1..20: mol_type = other RNA
gccctgtgtctcaaattacc

SEQ ID NO: 465 - RNA, 20 nt, synthetic construct
  source 1..20: mol_type = other RNA
tttggccctgtgtctcaaat

SEQ ID NO: 466 - RNA, 20 nt, synthetic construct
  source 1..20: mol_type = other RNA
attttggccctgtgtctcaa

SEQ ID NO: 467 - RNA, 20 nt, synthetic construct
  source 1..20: mol_type = other RNA
tctagattttggccctgtgt

SEQ ID NO: 468 - RNA, 20 nt, synthetic construct
  source 1..20: mol_type = other RNA
ctctagattttggccctgtg

SEQ ID NO: 469 - RNA, 20 nt, synthetic construct
  source 1..20: mol_type = other RNA
tcctctagattttggccctg

SEQ ID NO: 470 - RNA, 20 nt, synthetic construct
  source 1..20: mol_type = other RNA
ttttcctctagattttggcc

SEQ ID NO: 471 - RNA, 20 nt, synthetic construct
  source 1..20: mol_type = other RNA
ttttagactggattttcaga

SEQ ID NO: 472 - RNA, 20 nt, synthetic construct
  source 1..20: mol_type = other RNA
ccctttttagactggatttt

SEQ ID NO: 473 - RNA, 20 nt, synthetic construct
  source 1..20: mol_type = other RNA
aaccctttttagactggatt

SEQ ID NO: 474 - RNA, 20 nt, synthetic construct
  source 1..20: mol_type = other RNA
gaaccctttttagactggat

SEQ ID NO: 475 - RNA, 20 nt, synthetic construct
  source 1..20: mol_type = other RNA
gagaaccctttttagactgg

SEQ ID NO: 476 - RNA, 20 nt, synthetic construct
  source 1..20: mol_type = other RNA
ggagaaccctttttagactg

SEQ ID NO: 477 - RNA, 20 nt, synthetic construct
  source 1..20: mol_type = other RNA
atggagaaccctttttagac

SEQ ID NO: 478 - RNA, 20 nt, synthetic construct
  source 1..20: mol_type = other RNA
tatggagaaccctttttaga

SEQ ID NO: 479 - RNA, 20 nt, synthetic construct
  source 1..20: mol_type = other RNA
ggtatggagaacccttttta

SEQ ID NO: 480 - RNA, 20 nt, synthetic construct
  source 1..20: mol_type = other RNA
aggtatggagaacccttttt

SEQ ID NO: 481 - RNA, 20 nt, synthetic construct
  source 1..20: mol_type = other RNA
tgtaggtatggagaaccctt

SEQ ID NO: 482 - RNA, 20 nt, synthetic construct
  source 1..20: mol_type = other RNA
atatctgtaggtatggagaa

SEQ ID NO: 483 - RNA, 20 nt, synthetic construct
  source 1..20: mol_type = other RNA
agatatctgtaggtatggag

SEQ ID NO: 484 - RNA, 20 nt, synthetic construct
  source 1..20: mol_type = other RNA
aagatatctgtaggtatgga

SEQ ID NO: 485 - RNA, 20 nt, synthetic construct
  source 1..20: mol_type = other RNA
ctaagatatctgtaggtatg

SEQ ID NO: 486 - RNA, 20 nt, synthetic construct
  source 1..20: mol_type = other RNA
tctaagatatctgtaggtat

SEQ ID NO: 487 - RNA, 20 nt, synthetic construct
  source 1..20: mol_type = other RNA
gtctaagatatctgtaggta

SEQ ID NO: 488 - RNA, 20 nt, synthetic construct
  source 1..20: mol_type = other RNA
gagtctaagatatctgtagg

SEQ ID NO: 489 - RNA, 20 nt, synthetic construct
  source 1..20: mol_type = other RNA
tggagtctaagatatctgta

SEQ ID NO: 490 - RNA, 20 nt, synthetic construct
  source 1..20: mol_type = other RNA
ctggagtctaagatatctgt

SEQ ID NO: 491 - RNA, 20 nt, synthetic construct
  source 1..20: mol_type = other RNA
tctggagtctaagatatctg

SEQ ID NO: 492 - RNA, 20 nt, synthetic construct
  source 1..20: mol_type = other RNA
gtctggagtctaagatatct

SEQ ID NO: 493 - RNA, 20 nt, synthetic construct
  source 1..20: mol_type = other RNA
ggtctggagtctaagatatc

SEQ ID NO: 494 - RNA, 20 nt, synthetic construct
  source 1..20: mol_type = other RNA
gggtctggagtctaagatat

SEQ ID NO: 495 - RNA, 20 nt, synthetic construct
  source 1..20: mol_type = other RNA
ctttctctgtgggtctaggg

SEQ ID NO: 496 - RNA, 20 nt, synthetic construct
  source 1..20: mol_type = other RNA
ctttctctgtgggtctaggg

SEQ ID NO: 497 - RNA, 20 nt, synthetic construct
  source 1..20: mol_type = other RNA
ctttctctgtgggtctaggg

SEQ ID NO: 498 - RNA, 20 nt, synthetic construct
  source 1..20: mol_type = other RNA
ctttctctgtgggtctaggg

SEQ ID NO: 499 - RNA, 20 nt, synthetic construct
  source 1..20: mol_type = other RNA
ctttctctgtgggtctaggg

SEQ ID NO: 500 - RNA, 20 nt, synthetic construct
  source 1..20: mol_type = other RNA
ctttctctgtgggtctaggg

SEQ ID NO: 501 - RNA, 20 nt, synthetic construct
  source 1..20: mol_type = other RNA
ctttctctgtgggtctaggg

SEQ ID NO: 502 - RNA, 18 nt, synthetic construct
  source 1..18: mol_type = other RNA
ctttctctgtgggtctag

SEQ ID NO: 503 - RNA, 18 nt, synthetic construct
  source 1..18: mol_type = other RNA
ctttctctgtgggtctag

SEQ ID NO: 504 - RNA, 18 nt, synthetic construct
  source 1..18: mol_type = other RNA
ctttctctgtgggtctag

SEQ ID NO: 505 - RNA, 18 nt, synthetic construct
  source 1..18: mol_type = other RNA
ctttctctgtgggtctag

SEQ ID NO: 506 - RNA, 18 nt, synthetic construct
  source 1..18: mol_type = other RNA
ctttctctgtgggtctag

SEQ ID NO: 507 - RNA, 18 nt, synthetic construct
  source 1..18: mol_type = other RNA
ctttctctgtgggtctag

SEQ ID NO: 508 - RNA, 18 nt, synthetic construct
  source 1..18: mol_type = other RNA
ctttctctgtgggtctag

SEQ ID NO: 509 - RNA, 18 nt, synthetic construct
  source 1..18: mol_type = other RNA
ctttctctgtgggtctag

SEQ ID NO: 510 - RNA, 18 nt, synthetic construct
  source 1..18: mol_type = other RNA
ctttctctgtgggtctag

SEQ ID NO: 511 - RNA, 20 nt, synthetic construct
  source 1..20: mol_type = other RNA
tctttctctgtgggtctagg

SEQ ID NO: 512 - RNA, 20 nt, synthetic construct
  source 1..20: mol_type = other RNA
atctttctctgtgggtctag

SEQ ID NO: 513 - RNA, 20 nt, synthetic construct
  source 1..20: mol_type = other RNA
tttctctgtgggtctagggt

SEQ ID NO: 514 - RNA, 20 nt, synthetic construct
  source 1..20: mol_type = other RNA
ttctctgtgggtctagggtc

SEQ ID NO: 515 - RNA, 18 nt, synthetic construct
  source 1..18: mol_type = other RNA
gacctctgtctctctctg

SEQ ID NO: 516 - RNA, 26 nt, synthetic construct
  source 1..26: mol_type = other RNA
ttaggacctctgtctctctctggtgt

SEQ ID NO: 517 - RNA, 22 nt, synthetic construct
  source 1..22: mol_type = other RNA
aggacctctgtctctctctggt

SEQ ID NO: 518 - RNA, 22 nt, synthetic construct
  source 1..22: mol_type = other RNA
aggacctctgtctctctctggt

SEQ ID NO: 519 - RNA, 22 nt, synthetic construct
  source 1..22: mol_type = other RNA
aggacctctgtctctctctggt

SEQ ID NO: 520 - RNA, 22 nt, synthetic construct
  source 1..22: mol_type = other RNA
aggacctctgtctctctctggt

SEQ ID NO: 521 - RNA, 22 nt, synthetic construct
  source 1..22: mol_type = other RNA
aggacctctgtctctctctggt

SEQ ID NO: 522 - RNA, 22 nt, synthetic construct
  source 1..22: mol_type = other RNA
aggacctctgtctctctctggt

SEQ ID NO: 523 - RNA, 22 nt, synthetic construct
  source 1..22: mol_type = other RNA
aggacctctgtctctctctggt

SEQ ID NO: 524 - RNA, 22 nt, synthetic construct
  source 1..22: mol_type = other RNA
aggacctctgtctctctctggt

SEQ ID NO: 525 - RNA, 22 nt, synthetic construct
  source 1..22: mol_type = other RNA
aggacctctgtctctctctggt

SEQ ID NO: 526 - RNA, 20 nt, synthetic construct
  source 1..20: mol_type = other RNA
caagtgccaggcccacatgg

SEQ ID NO: 527 - RNA, 20 nt, synthetic construct
  source 1..20: mol_type = other RNA
ggcaagtgccaggcccacat

SEQ ID NO: 528 - RNA, 20 nt, synthetic construct
  source 1..20: mol_type = other RNA
gggcaagtgccaggcccaca

SEQ ID NO: 529 - RNA, 22 nt, synthetic construct
  source 1..22: mol_type = other RNA
tctctctggtgtgtttttgagt

SEQ ID NO: 530 - RNA, 22 nt, synthetic construct
  source 1..22: mol_type = other RNA
tctctctggtgtgtttttgagt

SEQ ID NO: 531 - RNA, 20 nt, synthetic construct
  source 1..20: mol_type = other RNA
ggcaagtgccaggcccacat

SEQ ID NO: 532 - RNA, 20 nt, synthetic construct
  source 1..20: mol_type = other RNA
tgaagtatctttctctgtgg

SEQ ID NO: 533 - RNA, 20 nt, synthetic construct
  source 1..20: mol_type = other RNA
tgaagtatctttctctgtgg

SEQ ID NO: 534 - RNA, 20 nt, synthetic construct
  source 1..20: mol_type = other RNA
tgaagtatctttctctgtgg

SEQ ID NO: 535 - RNA, 20 nt, synthetic construct
  source 1..20: mol_type = other RNA
tgaagtatctttctctgtgg

SEQ ID NO: 536 - RNA, 20 nt, synthetic construct
  source 1..20: mol_type = other RNA
tgaagtatctttctctgtgg

SEQ ID NO: 537 - RNA, 20 nt, synthetic construct
  source 1..20: mol_type = other RNA
tgaagtatctttctctgtgg

SEQ ID NO: 538 - RNA, 20 nt, synthetic construct
  source 1..20: mol_type = other RNA
tgaagtatctttctctgtgg

SEQ ID NO: 539 - RNA, 20 nt, synthetic construct
  source 1..20: mol_type = other RNA
tgaagtatctttctctgtgg

SEQ ID NO: 540 - RNA, 32 nt, synthetic construct
  source 1..32: mol_type = other RNA
ggacctctgtctctctctggtgtgtttttgag

SEQ ID NO: 541 - RNA, 19 nt, synthetic construct
  source 1..19: mol_type = other RNA
tctctggtgtgtttttgag

SEQ ID NO: 542 - RNA, 20 nt, synthetic construct
  source 1..20: mol_type = other RNA
  modified_base 1..20: mod_base = OTHER; note = Phosphorothioate linkage
  modified_base 1..20: mod_base = OTHER; note = 2'-O-(2-methoxyethyl) ribonucleotide
  modified_base 2: mod_base = OTHER; note = 5-methyl cytidine
  modified_base 5: mod_base = OTHER; note = 5-methyl cytidine
  modified_base 8: mod_base = OTHER; note = 5-methyl cytidine
  modified_base 11: mod_base = OTHER; note = 5-methyl cytidine
  modified_base 13..16: mod_base = OTHER; note = 5-methyl cytidine
acttcagcagctccccggga

SEQ ID NO: 543 - RNA, 20 nt, synthetic construct
  source 1..20: mol_type = other RNA
  modified_base 1..20: mod_base = OTHER; note = Phosphorothioate linkage
  modified_base 1..20: mod_base = OTHER; note = 2'-O-(2-methoxyethyl) ribonucleotide
  modified_base 3..4: mod_base = OTHER; note = 5-methyl cytidine
  modified_base 6: mod_base = OTHER; note = 5-methyl cytidine
  modified_base 8: mod_base = OTHER; note = 5-methyl cytidine
  modified_base 12..13: mod_base = OTHER; note = 5-methyl cytidine
  modified_base 15: mod_base = OTHER; note = 5-methyl cytidine
  modified_base 18: mod_base = OTHER; note = 5-methyl cytidine
tgcctctcggtcctctgcag

SEQ ID NO: 544 - DNA, 20 bp, synthetic construct
  source 1..20: mol_type = other DNA
  modified_base 1..20: mod_base = OTHER; note = Phosphorothioate linkage
  modified_base 1..5: mod_base = OTHER; note = 2'-O-(2-methoxyethyl) ribonucleotide
  misc_feature 1..5: note = RNA
  misc_feature 6..15: note = DNA
  misc_feature 16..20: note = RNA
  modified_base 16..20: mod_base = OTHER; note = 2'-O-(2-methoxyethyl) ribonucleotide
  modified_base 2: mod_base = OTHER; note = 5-methyl cytidine
  modified_base 5: mod_base = OTHER; note = 5-methyl cytidine
  modified_base 8: mod_base = OTHER; note = 5-methyl cytidine
  modified_base 11: mod_base = OTHER; note = 5-methyl cytidine
  modified_base 13..16: mod_base = OTHER; note = 5-methyl cytidine
acttcagcagctccccggga

SEQ ID NO: 545 - DNA, 20 bp, synthetic construct
  source 1..20: mol_type = other DNA
  modified_base 1..20: mod_base = OTHER; note = Phosphorothioate linkage
  modified_base 1..5: mod_base = OTHER; note = 2'-O-(2-methoxyethyl) ribonucleotide
  misc_feature 1..5: note = RNA
  misc_feature 6..15: note = DNA
  misc_feature 16..20: note = RNA
  modified_base 16..20: mod_base = OTHER; note = 2'-O-(2-methoxyethyl) ribonucleotide
  modified_base 3..4: mod_base = OTHER; note = 5-methyl cytidine
  modified_base 6: mod_base = OTHER; note = 5-methyl cytidine
  modified_base 8: mod_base = OTHER; note = 5-methyl cytidine
  modified_base 12..13: mod_base = OTHER; note = 5-methyl cytidine
  modified_base 15: mod_base = OTHER; note = 5-methyl cytidine
  modified_base 18: mod_base = OTHER; note = 5-methyl cytidine
tgcctctcggtcctctgcag

SEQ ID NO: 546 - DNA, 20 bp, synthetic construct
  source 1..20: mol_type = other DNA
  modified_base 1..5: mod_base = OTHER; note = Phosphorothioate linkage
  modified_base 1..5: mod_base = OTHER; note = 2'-O-(2-methoxyethyl) ribonucleotide
  misc_feature 1..5: note = RNA
  misc_feature 6..15: note = DNA
  misc_feature 16..20: note = RNA
  modified_base 16..20: mod_base = OTHER; note = 2'-O-(2-methoxyethyl) ribonucleotide
  modified_base 4: mod_base = OTHER; note = 5-methyl cytidine
  modified_base 6: mod_base = OTHER; note = 5-methyl cytidine
  modified_base 8..11: mod_base = OTHER; note = 5-methyl cytidine
  modified_base 13: mod_base = OTHER; note = 5-methyl cytidine
  modified_base 15: mod_base = OTHER; note = 5-methyl cytidine
  modified_base 20: mod_base = OTHER; note = 5-methyl cytidine
aatctcgcccctctcaggac

SEQ ID NO: 547 - DNA, 20 bp, synthetic construct
  source 1..20: mol_type = other DNA
  modified_base 1..20: mod_base = OTHER; note = Phosphorothioate linkage
  modified_base 1..5: mod_base = OTHER; note = 2'-O-(2-methoxyethyl) ribonucleotide
  misc_feature 1..5: note = RNA
  misc_feature 6..15: note = DNA
  misc_feature 16..20: note = RNA
  modified_base 16..20: mod_base = OTHER; note = 2'-O-(2-methoxyethyl) ribonucleotide
  modified_base 1..2: mod_base = OTHER; note = 5-methyl cytidine
  modified_base 5: mod_base = OTHER; note = 5-methyl cytidine
  modified_base 10: mod_base = OTHER; note = 5-methyl cytidine
  modified_base 12: mod_base = OTHER; note = 5-methyl cytidine
  modified_base 14..17: mod_base = OTHER; note = 5-methyl cytidine
  modified_base 19: mod_base = OTHER; note = 5-methyl cytidine
ccaactaatctcgcccctct

SEQ ID NO: 548 - DNA, 20 bp, synthetic construct
  source 1..20: mol_type = other DNA
  modified_base 1..20: mod_base = OTHER; note = Phosphorothioate linkage
  modified_base 1..5: mod_base = OTHER; note = 2'-O-(2-methoxyethyl) ribonucleotide
  misc_feature 1..5: note = RNA
  misc_feature 6..15: note = DNA
  misc_feature 16..20: note = RNA
  modified_base 16..20: mod_base = OTHER; note = 2'-O-(2-methoxyethyl) ribonucleotide
  modified_base 7..9: mod_base = OTHER; note = 5-methyl cytidine
  modified_base 12: mod_base = OTHER; note = 5-methyl cytidine
  modified_base 17: mod_base = OTHER; note = 5-methyl cytidine
  modified_base 19: mod_base = OTHER; note = 5-methyl cytidine
taagtacccaactaatctcg

SEQ ID NO: 549 - DNA, 20 bp, synthetic construct
  source 1..20: mol_type = other DNA
  modified_base 1..20: mod_base = OTHER; note = Phosphorothioate linkage
  modified_base 1..5: mod_base = OTHER; note = 2'-O-(2-methoxyethyl) ribonucleotide
  misc_feature 1..5: note = RNA
  misc_feature 6..15: note = DNA
  misc_feature 16..20: note = RNA
  modified_base 16..20: mod_base = OTHER; note = 2'-O-(2-methoxyethyl) ribonucleotide
  modified_base 1: mod_base = OTHER; note = 5-methyl cytidine
  modified_base 5..7: mod_base = OTHER; note = 5-methyl cytidine
  modified_base 9: mod_base = OTHER; note = 5-methyl cytidine
  modified_base 20: mod_base = OTHER; note = 5-methyl cytidine
caggcccacatggtaagtac

SEQ ID NO: 550 - DNA, 20 bp, synthetic construct
  source 1..20: mol_type = other DNA
  modified_base 1..20: mod_base = OTHER; note = Phosphorothioate linkage
  modified_base 1..5: mod_base = OTHER; note = 2'-O-(2-methoxyethyl) ribonucleotide
  misc_feature 1..5: note = RNA
  misc_feature 6..15: note = DNA
  misc_feature 16..20: note = RNA
  modified_base 16..20: mod_base = OTHER; note = 2'-O-(2-methoxyethyl) ribonucleotide
  modified_base 2: mod_base = OTHER; note = 5-methyl cytidine
  modified_base 8..9: mod_base = OTHER; note = 5-methyl cytidine
  modified_base 13..15: mod_base = OTHER; note = 5-methyl cytidine
  modified_base 17: mod_base = OTHER; note = 5-methyl cytidine
gcaagtgccaggcccacatg

SEQ ID NO: 551 - DNA, 20 bp, synthetic construct
  source 1..20: mol_type = other DNA
  modified_base 1..20: mod_base = OTHER; note = Phosphorothioate linkage
  modified_base 1..5: mod_base = OTHER; note = 2'-O-(2-methoxyethyl) ribonucleotide
  misc_feature 1..5: note = RNA
  misc_feature 6..15: note = DNA
  misc_feature 16..20: note = RNA
  modified_base 16..20: mod_base = OTHER; note = 2'-O-(2-methoxyethyl) ribonucleotide
  modified_base 9: mod_base = OTHER; note = 5-methyl cytidine
  modified_base 11: mod_base = OTHER; note = 5-methyl cytidine
tgggaagacacaaagtgatg

SEQ ID NO: 552 - DNA, 20 bp, synthetic construct
  source 1..20: mol_type = other DNA
  modified_base 1..20: mod_base = OTHER; note = Phosphorothioate linkage
  modified_base 1..5: mod_base = OTHER; note = 2'-O-(2-methoxyethyl) ribonucleotide
  misc_feature 1..5: note = RNA
  misc_feature 6..15: note = DNA
  misc_feature 16..20: note = RNA
  modified_base 16..20: mod_base = OTHER; note = 2'-O-(2-methoxyethyl) ribonucleotide
  modified_base 2: mod_base = OTHER; note = 5-methyl cytidine
  modified_base 9: mod_base = OTHER; note = 5-methyl cytidine
  modified_base 12: mod_base = OTHER; note = 5-methyl cytidine
  modified_base 15..19: mod_base = OTHER; note = 5-methyl cytidine
actgaggacggcaaccccca

SEQ ID NO: 553 - DNA, 20 bp, synthetic construct
  source 1..20: mol_type = other DNA
  modified_base 1..20: mod_base = OTHER; note = Phosphorothioate linkage
  modified_base 1..5: mod_base = OTHER; note = 2'-O-(2-methoxyethyl) ribonucleotide
  misc_feature 1..5: note = RNA
  misc_feature 6..15: note = DNA
  misc_feature 16..20: note = RNA
  modified_base 16..20: mod_base = OTHER; note = 2'-O-(2-methoxyethyl) ribonucleotide
  modified_base 1: mod_base = OTHER; note = 5-methyl cytidine
  modified_base 8: mod_base = OTHER; note = 5-methyl cytidine
  modified_base 15: mod_base = OTHER; note = 5-methyl cytidine
  modified_base 18: mod_base = OTHER; note = 5-methyl cytidine
ctggaaactgaggacggcaa

SEQ ID NO: 554 - DNA, 20 bp, synthetic construct
  source 1..20: mol_type = other DNA
  modified_base 1..20: mod_base = OTHER; note = Phosphorothioate linkage
  modified_base 1..5: mod_base = OTHER; note = 2'-O-(2-methoxyethyl) ribonucleotide
  misc_feature 1..5: note = RNA
  misc_feature 6..15: note = DNA
  misc_feature 16..20: note = RNA
  modified_base 16..20: mod_base = OTHER; note = 2'-O-(2-methoxyethyl) ribonucleotide
  modified_base 5..8: mod_base = OTHER; note = 5-methyl cytidine
  modified_base 10..11: mod_base = OTHER; note = 5-methyl cytidine
  modified_base 18: mod_base = OTHER; note = 5-methyl cytidine
tttcccccgcctggaaactg

SEQ ID NO: 555 - DNA, 20 bp, synthetic construct
  source 1..20: mol_type = other DNA
  modified_base 1..20: mod_base = OTHER; note = Phosphorothioate linkage
  modified_base 1..5: mod_base = OTHER; note = 2'-O-(2-methoxyethyl) ribonucleotide
  misc_feature 1..5: note = RNA
  misc_feature 6..15: note = DNA
  misc_feature 16..20: note = RNA
  modified_base 16..20: mod_base = OTHER; note = 2'-O-(2-methoxyethyl) ribonucleotide
  modified_base 5: mod_base = OTHER; note = 5-methyl cytidine
  modified_base 7: mod_base = OTHER; note = 5-methyl cytidine
  modified_base 10..11: mod_base = OTHER; note = 5-methyl cytidine
  modified_base 14..16: mod_base = OTHER; note = 5-methyl cytidine
  modified_base 15: mod_base = OTHER; note = 5-methyl cytidine
  modified_base 18: mod_base = OTHER; note = 5-methyl cytidine
gtgacgcttccagcccgttt

SEQ ID NO: 556 - DNA, 20 bp, synthetic construct
  source 1..20: mol_type = other DNA
  modified_base 1..20: mod_base = OTHER; note = Phosphorothioate linkage
  modified_base 1..5: mod_base = OTHER; note = 2'-O-(2-methoxyethyl) ribonucleotide
  misc_feature 1..5: note = RNA
  misc_feature 6..15: note = DNA
  misc_feature 16..20: note = RNA
  modified_base 16..20: mod_base = OTHER; note = 2'-O-(2-methoxyethyl) ribonucleotide
  modified_base 4: mod_base = OTHER; note = 5-methyl cytidine
  modified_base 12: mod_base = OTHER; note = 5-methyl cytidine
  modified_base 14: mod_base = OTHER; note = 5-methyl cytidine
  modified_base 17..18: mod_base = OTHER; note = 5-methyl cytidine
tagctgagtgacgcttccag

SEQ ID NO: 557 - DNA, 20 bp, synthetic construct
  source 1..20: mol_type = other DNA
  modified_base 1..20: mod_base = OTHER; note = Phosphorothioate linkage
  modified_base 1..5: mod_base = OTHER; note = 2'-O-(2-methoxyethyl) ribonucleotide
  misc_feature 1..5: note = RNA
  misc_feature 6..15: note = DNA
  misc_feature 16..20: note = RNA
  modified_base 16..20: mod_base = OTHER; note = 2'-O-(2-methoxyethyl) ribonucleotide
  modified_base 3: mod_base = OTHER; note = 5-methyl cytidine
  modified_base 10: mod_base = OTHER; note = 5-methyl cytidine
  modified_base 18: mod_base = OTHER; note = 5-methyl cytidine
  modified_base 20: mod_base = OTHER; note = 5-methyl cytidine
tactattagctgagtgacgc

SEQ ID NO: 558 - DNA, 20 bp, synthetic construct
  source 1..20: mol_type = other DNA
  modified_base 1..20: mod_base = OTHER; note = Phosphorothioate linkage
  modified_base 1..5: mod_base = OTHER; note = 2'-O-(2-methoxyethyl) ribonucleotide
  misc_feature 1..5: note = RNA
  misc_feature 6..15: note = DNA
  misc_feature 16..20: note = RNA
  modified_base 16..20: mod_base = OTHER; note = 2'-O-(2-methoxyethyl) ribonucleotide
  modified_base 4..5: mod_base = OTHER; note = 5-methyl cytidine
  modified_base 7: mod_base = OTHER; note = 5-methyl cytidine
  modified_base 10: mod_base = OTHER; note = 5-methyl cytidine
  modified_base 17: mod_base = OTHER; note = 5-methyl cytidine
ggtccactactattagctga

SEQ ID NO: 559 - DNA, 20 bp, synthetic construct
  source 1..20: mol_type = other DNA
  modified_base 1..20: mod_base = OTHER; note = Phosphorothioate linkage
  modified_base 1..5: mod_base = OTHER; note = 2'-O-(2-methoxyethyl) ribonucleotide
  misc_feature 1..5: note = RNA
  misc_feature 6..15: note = DNA
  misc_feature 16..20: note = RNA
  modified_base 16..20: mod_base = OTHER; note = 2'-O-(2-methoxyethyl) ribonucleotide
  modified_base 3..5: mod_base = OTHER; note = 5-methyl cytidine
  modified_base 10..11: mod_base = OTHER; note = 5-methyl cytidine
  modified_base 13: mod_base = OTHER; note = 5-methyl cytidine
  modified_base 16: mod_base = OTHER; note = 5-methyl cytidine
gtcccaggtccactactatt

SEQ ID NO: 560 - DNA, 20 bp, synthetic construct
  source 1..20: mol_type = other DNA
  modified_base 1..20: mod_base = OTHER; note = Phosphorothioate linkage
  modified_base 1..5: mod_base = OTHER; note = 2'-O-(2-methoxyethyl) ribonucleotide
  misc_feature 1..5: note = RNA
  misc_feature 6..15: note = DNA
  misc_feature 16..20: note = RNA
  modified_base 16..20: mod_base = OTHER; note = 2'-O-(2-methoxyethyl) ribonucleotide
  modified_base 4..5: mod_base = OTHER; note = 5-methyl cytidine
  modified_base 9..11: mod_base = OTHER; note = 5-methyl cytidine
  modified_base 16..17: mod_base = OTHER; note = 5-methyl cytidine
  modified_base 19: mod_base = OTHER; note = 5-methyl cytidine
gttccagtcccaggtccact

SEQ ID NO: 561 - DNA, 20 bp, synthetic construct
  source 1..20: mol_type = other DNA
  modified_base 1..20: mod_base = OTHER; note = Phosphorothioate linkage
  modified_base 1..5: mod_base = OTHER; note = 2'-O-(2-methoxyethyl) ribonucleotide
  misc_feature 1..5: note = RNA
  misc_feature 6..15: note = DNA
  misc_feature 16..20: note = RNA
  modified_base 16..20: mod_base = OTHER; note = 2'-O-(2-methoxyethyl) ribonucleotide
  modified_base 4: mod_base = OTHER; note = 5-methyl cytidine
  modified_base 11..12: mod_base = OTHER; note = 5-methyl cytidine
  modified_base 16..18: mod_base = OTHER; note = 5-methyl cytidine
aatctgagttccagtcccag

SEQ ID NO: 562 - DNA, 20 bp, synthetic construct
  source 1..20: mol_type = other DNA
  modified_base 1..20: mod_base = OTHER; note = Phosphorothioate linkage
  modified_base 1..5: mod_base = OTHER; note = 2'-O-(2-methoxyethyl) ribonucleotide
  misc_feature 1..5: note = RNA
  misc_feature 6..15: note = DNA
  misc_feature 16..20: note = RNA
  modified_base 16..20: mod_base = OTHER; note = 2'-O-(2-methoxyethyl) ribonucleotide
  modified_base 1..2: mod_base = OTHER; note = 5-methyl cytidine
  modified_base 7: mod_base = OTHER; note = 5-methyl cytidine
  modified_base 12: mod_base = OTHER; note = 5-methyl cytidine
  modified_base 19..20: mod_base = OTHER; note = 5-methyl cytidine
ccttagcaaatctgagttcc

SEQ ID NO: 563 - DNA, 20 bp, synthetic construct
  source 1..20: mol_type = other DNA
  modified_base 1..20: mod_base = OTHER; note = Phosphorothioate linkage
  modified_base 1..5: mod_base = OTHER; note = 2'-O-(2-methoxyethyl) ribonucleotide
  misc_feature 1..5: note = RNA
  misc_feature 6..15: note = DNA
  misc_feature 16..20: note = RNA
  modified_base 16..20: mod_base = OTHER; note = 2'-O-(2-methoxyethyl) ribonucleotide
  modified_base 2..3: mod_base = OTHER; note = 5-methyl cytidine
  modified_base 9..10: mod_base = OTHER; note = 5-methyl cytidine
  modified_base 15: mod_base = OTHER; note = 5-methyl cytidine
  modified_base 19: mod_base = OTHER; note = 5-methyl cytidine
gcctggttccttagcaaatc

SEQ ID NO: 564 - DNA, 20 bp, synthetic construct
  source 1..20: mol_type = other DNA
  modified_base 1..20: mod_base = OTHER; note = Phosphorothioate linkage
  modified_base 1..5: mod_base = OTHER; note = 2'-O-(2-methoxyethyl) ribonucleotide
  misc_feature 1..5: note = RNA
  misc_feature 6..15: note = DNA
  misc_feature 16..20: note = RNA
  modified_base 16..20: mod_base = OTHER; note = 2'-O-(2-methoxyethyl) ribonucleotide
  modified_base 4: mod_base = OTHER; note = 5-methyl cytidine
  modified_base 11: mod_base = OTHER; note = 5-methyl cytidine
gtgcagaaaacaggaaagaa

SEQ ID NO: 565 - DNA, 20 bp, synthetic construct
  source 1..20: mol_type = other DNA
  modified_base 1..20: mod_base = OTHER; note = Phosphorothioate linkage
  modified_base 1..5: mod_base = OTHER; note = 2'-O-(2-methoxyethyl) ribonucleotide
  misc_feature 1..5: note = RNA
  misc_feature 6..15: note = DNA
  misc_feature 16..20: note = RNA
  modified_base 16..20: mod_base = OTHER; note = 2'-O-(2-methoxyethyl) ribonucleotide
  modified_base 2: mod_base = OTHER; note = 5-methyl cytidine
  modified_base 4..6: mod_base = OTHER; note = 5-methyl cytidine
  modified_base 10: mod_base = OTHER; note = 5-methyl cytidine
  modified_base 17: mod_base = OTHER; note = 5-methyl cytidine
gctcccgtgcagaaaacagg

SEQ ID NO: 566 - DNA, 20 bp, synthetic construct
  source 1..20: mol_type = other DNA
  modified_base 1..20: mod_base = OTHER; note = Phosphorothioate linkage
  modified_base 1..5: mod_base = OTHER; note = 2'-O-(2-methoxyethyl) ribonucleotide
  misc_feature 1..5: note = RNA
  misc_feature 6..15: note = DNA
  misc_feature 16..20: note = RNA
  modified_base 16..20: mod_base = OTHER; note = 2'-O-(2-methoxyethyl) ribonucleotide
  modified_base 12: mod_base = OTHER; note = 5-methyl cytidine
  modified_base 14..16: mod_base = OTHER; note = 5-methyl cytidine
  modified_base 20: mod_base = OTHER; note = 5-methyl cytidine
tggttaaaatgctcccgtgc

SEQ ID NO: 567 - DNA, 20 bp, synthetic construct
  source 1..20: mol_type = other DNA
  modified_base 1..20: mod_base = OTHER; note = Phosphorothioate linkage
  modified_base 1..5: mod_base = OTHER; note = 2'-O-(2-methoxyethyl) ribonucleotide
  misc_feature 1..5: note = RNA
  misc_feature 6..15: note = DNA
  misc_feature 16..20: note = RNA
  modified_base 16..20: mod_base = OTHER; note = 2'-O-(2-methoxyethyl) ribonucleotide
  modified_base 6: mod_base = OTHER; note = 5-methyl cytidine
  modified_base 18: mod_base = OTHER; note = 5-methyl cytidine
  modified_base 20: mod_base = OTHER; note = 5-methyl cytidine
aattgctggttaaaatgctc

SEQ ID NO: 568 - DNA, 20 bp, synthetic construct
  source 1..20: mol_type = other DNA
  modified_base 1..20: mod_base = OTHER; note = Phosphorothioate linkage
  modified_base 1..5: mod_base = OTHER; note = 2'-O-(2-methoxyethyl) ribonucleotide
  misc_feature 1..5: note = RNA
  misc_feature 6..15: note = DNA
  misc_feature 16..20: note = RNA
  modified_base 16..20: mod_base = OTHER; note = 2'-O-(2-methoxyethyl) ribonucleotide
  modified_base 8: mod_base = OTHER; note = 5-methyl cytidine
  modified_base 17: mod_base = OTHER; note = 5-methyl cytidine
aaggtttctttaattgctgg

SEQ ID NO: 569 - RNA, 20 nt, synthetic construct
  source 1..20: mol_type = other RNA
  modified_base 1..20: mod_base = OTHER; note = Phosphorothioate linkage
  modified_base 1..20: mod_base = OTHER; note = 2'-O-(2-methoxyethyl) ribonucleotide
  modified_base 4: mod_base = OTHER; note = 5-methyl cytidine
  modified_base 6: mod_base = OTHER; note = 5-methyl cytidine
  modified_base 8..11: mod_base = OTHER; note = 5-methyl cytidine
  modified_base 13: mod_base = OTHER; note = 5-methyl cytidine
  modified_base 15: mod_base = OTHER; note = 5-methyl cytidine
  modified_base 20: mod_base = OTHER; note = 5-methyl cytidine
aatctcgcccctctcaggac

SEQ ID NO: 570 - RNA, 20 nt, synthetic construct
  source 1..20: mol_type = other RNA
  modified_base 1..20: mod_base = OTHER; note = Phosphorothioate linkage
  modified_base 1..20: mod_base = OTHER; note = 2'-O-(2-methoxyethyl) ribonucleotide
  modified_base 1..2: mod_base = OTHER; note = 5-methyl cytidine
  modified_base 5: mod_base = OTHER; note = 5-methyl cytidine
  modified_base 10: mod_base = OTHER; note = 5-methyl cytidine
  modified_base 12: mod_base = OTHER; note = 5-methyl cytidine
  modified_base 14..17: mod_base = OTHER; note = 5-methyl cytidine
  modified_base 19: mod_base = OTHER; note = 5-methyl cytidine
ccaactaatctcgcccctct

SEQ ID NO: 571 - RNA, 20 nt, synthetic construct
  source 1..20: mol_type = other RNA
  modified_base 1..20: mod_base = OTHER; note = Phosphorothioate linkage
  modified_base 1..20: mod_base = OTHER; note = 2'-O-(2-methoxyethyl) ribonucleotide
  modified_base 7..9: mod_base = OTHER; note = 5-methyl cytidine
  modified_base 12: mod_base = OTHER; note = 5-methyl cytidine
  modified_base 17: mod_base = OTHER; note = 5-methyl cytidine
  modified_base 19: mod_base = OTHER; note = 5-methyl cytidine
taagtacccaactaatctcg

SEQ ID NO: 572 - RNA, 20 nt, synthetic construct
  source 1..20: mol_type = other RNA
  modified_base 1..20: mod_base = OTHER; note = Phosphorothioate linkage
  modified_base 1..20: mod_base = OTHER; note = 2'-O-(2-methoxyethyl) ribonucleotide
  modified_base 1: mod_base = OTHER; note = 5-methyl cytidine
  modified_base 5..7: mod_base = OTHER; note = 5-methyl cytidine
  modified_base 9: mod_base = OTHER; note = 5-methyl cytidine
  modified_base 20: mod_base = OTHER; note = 5-methyl cytidine
caggcccacatggtaagtac

SEQ ID NO: 573 - RNA, 20 nt, synthetic construct
  source 1..20: mol_type = other RNA
  modified_base 1..20: mod_base = OTHER; note = Phosphorothioate linkage
  modified_base 1..20: mod_base = OTHER; note = 2'-O-(2-methoxyethyl) ribonucleotide
  modified_base 2: mod_base = OTHER; note = 5-methyl cytidine
  modified_base 8..9: mod_base = OTHER; note = 5-methyl cytidine
  modified_base 13..15: mod_base = OTHER; note = 5-methyl cytidine
  modified_base 17: mod_base = OTHER; note = 5-methyl cytidine
gcaagtgccaggcccacatg

SEQ ID NO: 574 - RNA, 20 nt, synthetic construct
  source 1..20: mol_type = other RNA
  modified_base 1..20: mod_base = OTHER; note = Phosphorothioate linkage
  modified_base 1..20: mod_base = OTHER; note = 2'-O-(2-methoxyethyl) ribonucleotide
  modified_base 9: mod_base = OTHER; note = 5-methyl cytidine
  modified_base 11: mod_base = OTHER; note = 5-methyl cytidine
tgggaagacacaaagtgatg

SEQ ID NO: 575 - RNA, 20 nt, synthetic construct
  source 1..20: mol_type = other RNA
  modified_base 1..20: mod_base = OTHER; note = Phosphorothioate linkage
  modified_base 1..20: mod_base = OTHER; note = 2'-O-(2-methoxyethyl) ribonucleotide
  modified_base 2: mod_base = OTHER; note = 5-methyl cytidine
  modified_base 9: mod_base = OTHER; note = 5-methyl cytidine
  modified_base 12: mod_base = OTHER; note = 5-methyl cytidine
  modified_base 15..19: mod_base = OTHER; note = 5-methyl cytidine
actgaggacggcaaccccca

SEQ ID NO: 576 - RNA, 20 nt, synthetic construct
  source 1..20: mol_type = other RNA
  modified_base 1..20: mod_base = OTHER; note = Phosphorothioate linkage
  modified_base 1..20: mod_base = OTHER; note = 2'-O-(2-methoxyethyl) ribonucleotide
  modified_base 1: mod_base = OTHER; note = 5-methyl cytidine
  modified_base 8: mod_base = OTHER; note = 5-methyl cytidine
  modified_base 15: mod_base = OTHER; note = 5-methyl cytidine
  modified_base 18: mod_base = OTHER; note = 5-methyl cytidine
ctggaaactgaggacggcaa

SEQ ID NO: 577 - RNA, 20 nt, synthetic construct
  source 1..20: mol_type = other RNA
  modified_base 1..20: mod_base = OTHER; note = Phosphorothioate linkage
  modified_base 1..20: mod_base = OTHER; note = 2'-O-(2-methoxyethyl) ribonucleotide
  modified_base 4..8: mod_base = OTHER; note = 5-methyl cytidine
  modified_base 10..11: mod_base = OTHER; note = 5-methyl cytidine
  modified_base 18: mod_base = OTHER; note = 5-methyl cytidine
tttcccccgcctggaaactg

SEQ ID NO: 578 - RNA, 20 nt, synthetic construct
  source 1..20: mol_type = other RNA
  modified_base 1..20: mod_base = OTHER; note = Phosphorothioate linkage
  modified_base 1..20: mod_base = OTHER; note = 2'-O-(2-methoxyethyl) ribonucleotide
  modified_base 5: mod_base = OTHER; note = 5-methyl cytidine
  modified_base 7: mod_base = OTHER; note = 5-methyl cytidine
  modified_base 10..11: mod_base = OTHER; note = 5-methyl cytidine
  modified_base 14..16: mod_base = OTHER; note = 5-methyl cytidine
gtgacgcttccagcccgttt

SEQ ID NO: 579 - RNA, 20 nt, synthetic construct
  source 1..20: mol_type = other RNA
  modified_base 1..20: mod_base = OTHER; note = Phosphorothioate linkage
  modified_base 1..20: mod_base = OTHER; note = 2'-O-(2-methoxyethyl) ribonucleotide
  modified_base 4: mod_base = OTHER; note = 5-methyl cytidine
  modified_base 12: mod_base = OTHER; note = 5-methyl cytidine
  modified_base 14: mod_base = OTHER; note = 5-methyl cytidine
  modified_base 17..18: mod_base = OTHER; note = 5-methyl cytidine
tagctgagtgacgcttccag

SEQ ID NO: 580 - RNA, 20 nt, synthetic construct
  source 1..20: mol_type = other RNA
  modified_base 1..20: mod_base = OTHER; note = Phosphorothioate linkage
  modified_base 1..20: mod_base = OTHER; note = 2'-O-(2-methoxyethyl) ribonucleotide
  modified_base 3: mod_base = OTHER; note = 5-methyl cytidine
  modified_base 10: mod_base = OTHER; note = 5-methyl cytidine
  modified_base 18: mod_base = OTHER; note = 5-methyl cytidine
  modified_base 20: mod_base = OTHER; note = 5-methyl cytidine
tactattagctgagtgacgc

SEQ ID NO: 581 - RNA, 20 nt, synthetic construct
  source 1..20: mol_type = other RNA
  modified_base 1..20: mod_base = OTHER; note = Phosphorothioate linkage
  modified_base 1..20: mod_base = OTHER; note = 2'-O-(2-methoxyethyl) ribonucleotide
  modified_base 4..5: mod_base = OTHER; note = 5-methyl cytidine
  modified_base 7: mod_base = OTHER; note = 5-methyl cytidine
  modified_base 10: mod_base = OTHER; note = 5-methyl cytidine
  modified_base 17: mod_base = OTHER; note = 5-methyl cytidine
ggtccactactattagctga

SEQ ID NO: 582 - RNA, 20 nt, synthetic construct
  source 1..20: mol_type = other RNA
  modified_base 1..20: mod_base = OTHER; note = Phosphorothioate linkage
  modified_base 1..20: mod_base = OTHER; note = 2'-O-(2-methoxyethyl) ribonucleotide
  modified_base 4..5: mod_base = OTHER; note = 5-methyl cytidine
  modified_base 7: mod_base = OTHER; note = 5-methyl cytidine
  modified_base 10: mod_base = OTHER; note = 5-methyl cytidine
  modified_base 17: mod_base = OTHER; note = 5-methyl cytidine
gtcccaggtccactactatt

SEQ ID NO: 583 - RNA, 20 nt, synthetic construct
  source 1..20: mol_type = other RNA
  modified_base 1..20: mod_base = OTHER; note = Phosphorothioate linkage
  modified_base 1..20: mod_base = OTHER; note = 2'-O-(2-methoxyethyl) ribonucleotide
  modified_base 4..5: mod_base = OTHER; note = 5-methyl cytidine
  modified_base 9..11: mod_base = OTHER; note = 5-methyl cytidine
  modified_base 16..17: mod_base = OTHER; note = 5-methyl cytidine
  modified_base 19: mod_base = OTHER; note = 5-methyl cytidine
gttccagtcccaggtccact

SEQ ID NO: 584 - RNA, 20 nt, synthetic construct
  source 1..20: mol_type = other RNA
  modified_base 1..20: mod_base = OTHER; note = Phosphorothioate linkage
  modified_base 1..20: mod_base = OTHER; note = 2'-O-(2-methoxyethyl) ribonucleotide
  modified_base 4: mod_base = OTHER; note = 5-methyl cytidine
  modified_base 11..12: mod_base = OTHER; note = 5-methyl cytidine
  modified_base 16..18: mod_base = OTHER; note = 5-methyl cytidine
aatctgagttccagtcccag

SEQ ID NO: 585 - RNA, 20 nt, synthetic construct
  source 1..20: mol_type = other RNA
  modified_base 1..20: mod_base = OTHER; note = Phosphorothioate linkage
  modified_base 1..20: mod_base = OTHER; note = 2'-O-(2-methoxyethyl) ribonucleotide
  modified_base 1..2: mod_base = OTHER; note = 5-methyl cytidine
  modified_base 7: mod_base = OTHER; note = 5-methyl cytidine
  modified_base 12: mod_base = OTHER; note = 5-methyl cytidine
  modified_base 19..20: mod_base = OTHER; note = 5-methyl cytidine
ccttagcaaatctgagttcc

SEQ ID NO: 586 - RNA, 20 nt, synthetic construct
  source 1..20: mol_type = other RNA
  modified_base 1..20: mod_base = OTHER; note = Phosphorothioate linkage
  modified_base 1..20: mod_base = OTHER; note = 2'-O-(2-methoxyethyl) ribonucleotide
  modified_base 2..3: mod_base = OTHER; note = 5-methyl cytidine
  modified_base 9..10: mod_base = OTHER; note = 5-methyl cytidine
  modified_base 15: mod_base = OTHER; note = 5-methyl cytidine
  modified_base 20: mod_base = OTHER; note = 5-methyl cytidine
gcctggttccttagcaaatc

SEQ ID NO: 587 - RNA, 20 nt, synthetic construct
  source 1..20: mol_type = other RNA
  modified_base 1..20: mod_base = OTHER; note = Phosphorothioate linkage
  modified_base 1..20: mod_base = OTHER; note = 2'-O-(2-methoxyethyl) ribonucleotide
  modified_base 4: mod_base = OTHER; note = 5-methyl cytidine
  modified_base 11: mod_base = OTHER; note = 5-methyl cytidine
gtgcagaaaacaggaaagaa

SEQ ID NO: 588 - RNA, 20 nt, synthetic construct
  source 1..20: mol_type = other RNA
  modified_base 1..20: mod_base = OTHER; note = Phosphorothioate linkage
  modified_base 1..20: mod_base = OTHER; note = 2'-O-(2-methoxyethyl) ribonucleotide
  modified_base 2: mod_base = OTHER; note = 5-methyl cytidine
  modified_base 4..6: mod_base = OTHER; note = 5-methyl cytidine
  modified_base 10: mod_base = OTHER; note = 5-methyl cytidine
  modified_base 17: mod_base = OTHER; note = 5-methyl cytidine
gctcccgtgcagaaaacagg

SEQ ID NO: 589 - RNA, 20 nt, synthetic construct
  source 1..20: mol_type = other RNA
  modified_base 1..20: mod_base = OTHER; note = Phosphorothioate linkage
  modified_base 1..20: mod_base = OTHER; note = 2'-O-(2-methoxyethyl) ribonucleotide
  modified_base 12: mod_base = OTHER; note = 5-methyl cytidine
  modified_base 14..16: mod_base = OTHER; note = 5-methyl cytidine
  modified_base 20: mod_base = OTHER; note = 5-methyl cytidine
tggttaaaatgctcccgtgc

SEQ ID NO: 590 - RNA, 20 nt, synthetic construct
  source 1..20: mol_type = other RNA
  modified_base 1..20: mod_base = OTHER; note = Phosphorothioate linkage
  modified_base 1..20: mod_base = OTHER; note = 2'-O-(2-methoxyethyl) ribonucleotide
  modified_base 6: mod_base = OTHER; note = 5-methyl cytidine
  modified_base 18: mod_base = OTHER; note = 5-methyl cytidine
  modified_base 20: mod_base = OTHER; note = 5-methyl cytidine
aattgctggttaaaatgctc

SEQ ID NO: 591 - RNA, 20 nt, synthetic construct
  source 1..20: mol_type = other RNA
  modified_base 1..20: mod_base = OTHER; note = Phosphorothioate linkage
  modified_base 1..20: mod_base = OTHER; note = 2'-O-(2-methoxyethyl) ribonucleotide
  modified_base 8: mod_base = OTHER; note = 5-methyl cytidine
  modified_base 17: mod_base = OTHER; note = 5-methyl cytidine
aaggtttctttaattgctgg

SEQ ID NO: 592 - DNA, 20 bp, synthetic construct
  source 1..20: mol_type = other DNA
  modified_base 1..20: mod_base = OTHER; note = Phosphorothioate linkage
  modified_base 1..5: mod_base = OTHER; note = 2'-O-(2-methoxyethyl) ribonucleotide
  misc_feature 1..5: note = RNA
  misc_feature 6..15: note = DNA
  misc_feature 16..20: note = RNA
  modified_base 16..20: mod_base = OTHER; note = 2'-O-(2-methoxyethyl) ribonucleotide
  modified_base 1: mod_base = OTHER; note = 5-methyl cytidine
  modified_base 7: mod_base = OTHER; note = 5-methyl cytidine
  modified_base 9: mod_base = OTHER; note = 5-methyl cytidine
  modified_base 15: mod_base = OTHER; note = 5-methyl cytidine
  modified_base 17..18: mod_base = OTHER; note = 5-methyl cytidine
  modified_base 20: mod_base = OTHER; note = 5-methyl cytidine
cgttggctcttattctcctc

SEQ ID NO: 593 - DNA, 20 bp, synthetic construct
  source 1..20: mol_type = other DNA
  modified_base 1..20: mod_base = OTHER; note = Phosphorothioate linkage
  modified_base 1..5: mod_base = OTHER; note = 2'-O-(2-methoxyethyl) ribonucleotide
  misc_feature 1..5: note = RNA
  misc_feature 6..15: note = DNA
  misc_feature 16..20: note = RNA
  modified_base 16..20: mod_base = OTHER; note = 2'-O-(2-methoxyethyl) ribonucleotide
  modified_base 1: mod_base = OTHER; note = 5-methyl cytidine
  modified_base 3: mod_base = OTHER; note = 5-methyl cytidine
  modified_base 5: mod_base = OTHER; note = 5-methyl cytidine
ctctctggtgtgtttttgag

SEQ ID NO: 594 - DNA, 20 bp, synthetic construct
  source 1..20: mol_type = other DNA
  modified_base 1..20: mod_base = OTHER; note = Phosphorothioate linkage
  modified_base 1..5: mod_base = OTHER; note = 2'-O-(2-methoxyethyl) ribonucleotide
  misc_feature 1..5: note = RNA
  misc_feature 6..15: note = DNA
  misc_feature 16..20: note = RNA
  modified_base 16..20: mod_base = OTHER; note = 2'-O-(2-methoxyethyl) ribonucleotide
  modified_base 3: mod_base = OTHER; note = 5-methyl cytidine
  modified_base 6: mod_base = OTHER; note = 5-methyl cytidine
  modified_base 14..15: mod_base = OTHER; note = 5-methyl cytidine
  modified_base 17: mod_base = OTHER; note = 5-methyl cytidine
tgcatctttaggacctctgt

SEQ ID NO: 595 - DNA, 20 bp, synthetic construct
  source 1..20: mol_type = other DNA
  modified_base 1..20: mod_base = OTHER; note = Phosphorothioate linkage
  modified_base 1..5: mod_base = OTHER; note = 2'-O-(2-methoxyethyl) ribonucleotide
  misc_feature 1..5: note = RNA
  misc_feature 6..15: note = DNA
  misc_feature 16..20: note = RNA
  modified_base 16..20: mod_base = OTHER; note = 2'-O-(2-methoxyethyl) ribonucleotide
  modified_base 14: mod_base = OTHER; note = 5-methyl cytidine
  modified_base 18: mod_base = OTHER; note = 5-methyl cytidine
  modified_base 20: mod_base = OTHER; note = 5-methyl cytidine
ggtggtgaagtatctttctc

SEQ ID NO: 596 - DNA, 20 bp, synthetic construct
  source 1..20: mol_type = other DNA
  modified_base 1..20: mod_base = OTHER; note = Phosphorothioate linkage
  modified_base 1..5: mod_base = OTHER; note = 2'-O-(2-methoxyethyl) ribonucleotide
  misc_feature 1..5: note = RNA
  misc_feature 6..15: note = DNA
  misc_feature 16..20: note = RNA
  modified_base 16..20: mod_base = OTHER; note = 2'-O-(2-methoxyethyl) ribonucleotide
  modified_base 3: mod_base = OTHER; note = 5-methyl cytidine
  modified_base 5: mod_base = OTHER; note = 5-methyl cytidine
  modified_base 12..15: mod_base = OTHER; note = 5-methyl cytidine
  modified_base 17: mod_base = OTHER; note = 5-methyl cytidine
gtctcaaattaccccacagt

SEQ ID NO: 597 - DNA, 20 bp, synthetic construct
  source 1..20: mol_type = other DNA
  modified_base 1..20: mod_base = OTHER; note = Phosphorothioate linkage
  modified_base 1..5: mod_base = OTHER; note = 2'-O-(2-methoxyethyl) ribonucleotide
  misc_feature 1..5: note = RNA
  misc_feature 6..15: note = DNA
  misc_feature 16..20: note = RNA
  modified_base 16..20: mod_base = OTHER; note = 2'-O-(2-methoxyethyl) ribonucleotide
  modified_base 10..12: mod_base = OTHER; note = 5-methyl cytidine
  modified_base 18: mod_base = OTHER; note = 5-methyl cytidine
  modified_base 20: mod_base = OTHER; note = 5-methyl cytidine
agattttggccctgtgtctc

SEQ ID NO: 598 - DNA, 20 bp, synthetic construct
  source 1..20: mol_type = other DNA
  modified_base 1..20: mod_base = OTHER; note = Phosphorothioate linkage
  modified_base 1..5: mod_base = OTHER; note = 2'-O-(2-methoxyethyl) ribonucleotide
  misc_feature 1..5: note = RNA
  misc_feature 6..15: note = DNA
  misc_feature 16..20: note = RNA
  modified_base 16..20: mod_base = OTHER; note = 2'-O-(2-methoxyethyl) ribonucleotide
  modified_base 5: mod_base = OTHER; note = 5-methyl cytidine
  modified_base 7: mod_base = OTHER; note = 5-methyl cytidine
  modified_base 12..13: mod_base = OTHER; note = 5-methyl cytidine
  modified_base 15: mod_base = OTHER; note = 5-methyl cytidine
gagtctcttttcctctagat

SEQ ID NO: 599 - DNA, 20 bp, synthetic construct
  source 1..20: mol_type = other DNA
  modified_base 1..20: mod_base = OTHER; note = Phosphorothioate linkage
  modified_base 1..5: mod_base = OTHER; note = 2'-O-(2-methoxyethyl) ribonucleotide
  misc_feature 1..5: note = RNA
  misc_feature 6..15: note = DNA
  misc_feature 16..20: note = RNA
  modified_base 16..20: mod_base = OTHER; note = 2'-O-(2-methoxyethyl) ribonucleotide
  modified_base 4: mod_base = OTHER; note = 5-methyl cytidine
  modified_base 12..13: mod_base = OTHER; note = 5-methyl cytidine
  modified_base 15: mod_base = OTHER; note = 5-methyl cytidine
  modified_base 20: mod_base = OTHER; note = 5-methyl cytidine
ggtcgttttttcctcaaatc

SEQ ID NO: 600 - DNA, 20 bp, synthetic construct
  source 1..20: mol_type = other DNA
  modified_base 1..20: mod_base = OTHER; note = Phosphorothioate linkage
  modified_base 1..5: mod_base = OTHER; note = 2'-O-(2-methoxyethyl) ribonucleotide
  misc_feature 1..5: note = RNA
  misc_feature 6..15: note = DNA
  misc_feature 16..20: note = RNA
  modified_base 16..20: mod_base = OTHER; note = 2'-O-(2-methoxyethyl) ribonucleotide
  modified_base 11: mod_base = OTHER; note = 5-methyl cytidine
  modified_base 14: mod_base = OTHER; note = 5-methyl cytidine
  modified_base 16: mod_base = OTHER; note = 5-methyl cytidine
  modified_base 18: mod_base = OTHER; note = 5-methyl cytidine
  modified_base 20: mod_base = OTHER; note = 5-methyl cytidine
tgatattgagcttctctctc

SEQ ID NO: 601 - DNA, 20 bp, synthetic construct
  source 1..20: mol_type = other DNA
  modified_base 1..20: mod_base = OTHER; note = Phosphorothioate linkage
  modified_base 1..5: mod_base = OTHER; note = 2'-O-(2-methoxyethyl) ribonucleotide
  misc_feature 1..5: note = RNA
  misc_feature 6..15: note = DNA
  misc_feature 16..20: note = RNA
  modified_base 16..20: mod_base = OTHER; note = 2'-O-(2-methoxyethyl) ribonucleotide
  modified_base 11..13: mod_base = OTHER; note = 5-methyl cytidine
gtaggtatggagaacccttt

SEQ ID NO: 602 - DNA, 20 bp, synthetic construct
  source 1..20: mol_type = other DNA
  modified_base 1..20: mod_base = OTHER; note = Phosphorothioate linkage
  modified_base 1..5: mod_base = OTHER; note = 2'-O-(2-methoxyethyl) ribonucleotide
  misc_feature 1..5: note = RNA
  misc_feature 6..15: note = DNA
  misc_feature 16..20: note = RNA
  modified_base 16..20: mod_base = OTHER; note = 2'-O-(2-methoxyethyl) ribonucleotide
  modified_base 6: mod_base = OTHER; note = 5-methyl cytidine
  modified_base 15: mod_base = OTHER; note = 5-methyl cytidine
ggagtctaagatatctgtag

SEQ ID NO: 603 - DNA, 20 bp, synthetic construct
  source 1..20: mol_type = other DNA
  modified_base 1..20: mod_base = OTHER; note = Phosphorothioate linkage
  modified_base 1..5: mod_base = OTHER; note = 2'-O-(2-methoxyethyl) ribonucleotide
  misc_feature 1..5: note = RNA
  misc_feature 6..15: note = DNA
  misc_feature 16..20: note = RNA
  modified_base 16..20: mod_base = OTHER; note = 2'-O-(2-methoxyethyl) ribonucleotide
  modified_base 5: mod_base = OTHER; note = 5-methyl cytidine
  modified_base 11: mod_base = OTHER; note = 5-methyl cytidine
  modified_base 13: mod_base = OTHER; note = 5-methyl cytidine
  modified_base 18..19: mod_base = OTHER; note = 5-methyl cytidine
gagtctaggtctcaggtcct

SEQ ID NO: 604 - DNA, 20 bp, synthetic construct
  source 1..20: mol_type = other DNA
  modified_base 1..20: mod_base = OTHER; note = Phosphorothioate linkage
  modified_base 1..5: mod_base = OTHER; note = 2'-O-(2-methoxyethyl) ribonucleotide
  misc_feature 1..5: note = RNA
  misc_feature 6..15: note = DNA
  misc_feature 16..20: note = RNA
  modified_base 16..20: mod_base = OTHER; note = 2'-O-(2-methoxyethyl) ribonucleotide
  modified_base 2: mod_base = OTHER; note = 5-methyl cytidine
  modified_base 4: mod_base = OTHER; note = 5-methyl cytidine
  modified_base 10: mod_base = OTHER; note = 5-methyl cytidine
  modified_base 13: mod_base = OTHER; note = 5-methyl cytidine
  modified_base 16: mod_base = OTHER; note = 5-methyl cytidine
  modified_base 20: mod_base = OTHER; note = 5-methyl cytidine
gctctaattctacatctggc

SEQ ID NO: 605 - DNA, 20 bp, synthetic construct
  source 1..20: mol_type = other DNA
  modified_base 1..20: mod_base = OTHER; note = Phosphorothioate linkage
  modified_base 1..5: mod_base = OTHER; note = 2'-O-(2-methoxyethyl) ribonucleotide
  misc_feature 1..5: note = RNA
  misc_feature 6..15: note = DNA
  misc_feature 16..20: note = RNA
  modified_base 16..20: mod_base = OTHER; note = 2'-O-(2-methoxyethyl) ribonucleotide
  modified_base 1: mod_base = OTHER; note = 5-methyl cytidine
  modified_base 7: mod_base = OTHER; note = 5-methyl cytidine
  modified_base 14: mod_base = OTHER; note = 5-methyl cytidine
  modified_base 16: mod_base = OTHER; note = 5-methyl cytidine
ctaggtctgagttctctaag

SEQ ID NO: 606 - DNA, 20 bp, synthetic construct
  source 1..20: mol_type = other DNA
  modified_base 1..20: mod_base = OTHER; note = Phosphorothioate linkage
  modified_base 1..5: mod_base = OTHER; note = 2'-O-(2-methoxyethyl) ribonucleotide
  misc_feature 1..5: note = RNA
  misc_feature 6..15: note = DNA
  misc_feature 16..20: note = RNA
  modified_base 16..20: mod_base = OTHER; note = 2'-O-(2-methoxyethyl) ribonucleotide
  modified_base 3: mod_base = OTHER; note = 5-methyl cytidine
  modified_base 5: mod_base = OTHER; note = 5-methyl cytidine
  modified_base 14: mod_base = OTHER; note = 5-methyl cytidine
  modified_base 18: mod_base = OTHER; note = 5-methyl cytidine
  modified_base 20: mod_base = OTHER; note = 5-methyl cytidine
gtctctaagttatcagtctc

SEQ ID NO: 607 - DNA, 20 bp, synthetic construct
  source 1..20: mol_type = other DNA
  modified_base 1..20: mod_base = OTHER; note = Phosphorothioate linkage
  modified_base 1..5: mod_base = OTHER; note = 2'-O-(2-methoxyethyl) ribonucleotide
  misc_feature 1..5: note = RNA
  misc_feature 6..15: note = DNA
  misc_feature 16..20: note = RNA
  modified_base 16..20: mod_base = OTHER; note = 2'-O-(2-methoxyethyl) ribonucleotide
  modified_base 6: mod_base = OTHER; note = 5-methyl cytidine
  modified_base 15: mod_base = OTHER; note = 5-methyl cytidine
  modified_base 17: mod_base = OTHER; note = 5-methyl cytidine
taagtcaggagtgtctctgt

SEQ ID NO: 608 - DNA, 20 bp, synthetic construct
  source 1..20: mol_type = other DNA
  modified_base 1..20: mod_base = OTHER; note = Phosphorothioate linkage
  modified_base 1..5: mod_base = OTHER; note = 2'-O-(2-methoxyethyl) ribonucleotide
  misc_feature 1..5: note = RNA
  misc_feature 6..15: note = DNA
  misc_feature 16..20: note = RNA
  modified_base 16..20: mod_base = OTHER; note = 2'-O-(2-methoxyethyl) ribonucleotide
  modified_base 3: mod_base = OTHER; note = 5-methyl cytidine
  modified_base 5: mod_base = OTHER; note = 5-methyl cytidine
  modified_base 9: mod_base = OTHER; note = 5-methyl cytidine
  modified_base 11..14: mod_base = OTHER; note = 5-methyl cytidine
gtctctatctccccttaagt

SEQ ID NO: 609 - DNA, 20 bp, synthetic construct
  source 1..20: mol_type = other DNA
  modified_base 1..20: mod_base = OTHER; note = Phosphorothioate linkage
  modified_base 1..5: mod_base = OTHER; note = 2'-O-(2-methoxyethyl) ribonucleotide
  misc_feature 1..5: note = RNA
  misc_feature 6..15: note = DNA
  misc_feature 16..20: note = RNA
  modified_base 16..20: mod_base = OTHER; note = 2'-O-(2-methoxyethyl) ribonucleotide
  modified_base 3: mod_base = OTHER; note = 5-methyl cytidine
  modified_base 5..6: mod_base = OTHER; note = 5-methyl cytidine
  modified_base 10..11: mod_base = OTHER; note = 5-methyl cytidine
  modified_base 14: mod_base = OTHER; note = 5-methyl cytidine
atctccggaccagctgaagt

SEQ ID NO: 610 - DNA, 20 bp, synthetic construct
  source 1..20: mol_type = other DNA
  modified_base 1..20: mod_base = OTHER; note = Phosphorothioate linkage
  modified_base 1..5: mod_base = OTHER; note = 2'-O-(2-methoxyethyl) ribonucleotide
  misc_feature 1..5: note = RNA
  misc_feature 6..15: note = DNA
  misc_feature 16..20: note = RNA
  modified_base 16..20: mod_base = OTHER; note = 2'-O-(2-methoxyethyl) ribonucleotide
  modified_base 3: mod_base = OTHER; note = 5-methyl cytidine
  modified_base 5: mod_base = OTHER; note = 5-methyl cytidine
  modified_base 14..15: mod_base = OTHER; note = 5-methyl cytidine
  modified_base 18: mod_base = OTHER; note = 5-methyl cytidine
  modified_base 20: mod_base = OTHER; note = 5-methyl cytidine
gtctctgagttgtccatctc

SEQ ID NO: 611 - DNA, 20 bp, synthetic construct
  source 1..20: mol_type = other DNA
  modified_base 1..20: mod_base = OTHER; note = Phosphorothioate linkage
  modified_base 1..5: mod_base = OTHER; note = 2'-O-(2-methoxyethyl) ribonucleotide
  misc_feature 1..5: note = RNA
  misc_feature 6..15: note = DNA
  misc_feature 16..20: note = RNA
  modified_base 16..20: mod_base = OTHER; note = 2'-O-(2-methoxyethyl) ribonucleotide
  modified_base 2: mod_base = OTHER; note = 5-methyl cytidine
  modified_base 5: mod_base = OTHER; note = 5-methyl cytidine
  modified_base 19: mod_base = OTHER; note = 5-methyl cytidine
tcttcatgaattttgggtct

SEQ ID NO: 612 - DNA, 20 bp, synthetic construct
  source 1..20: mol_type = other DNA
  modified_base 1..20: mod_base = OTHER; note = Phosphorothioate linkage
  modified_base 1..5: mod_base = OTHER; note = 2'-O-(2-methoxyethyl) ribonucleotide
  misc_feature 1..5: note = RNA
  misc_feature 6..15: note = DNA
  misc_feature 16..20: note = RNA
  modified_base 16..20: mod_base = OTHER; note = 2'-O-(2-methoxyethyl) ribonucleotide
  modified_base 1: mod_base = OTHER; note = 5-methyl cytidine
  modified_base 3: mod_base = OTHER; note = 5-methyl cytidine
  modified_base 5: mod_base = OTHER; note = 5-methyl cytidine
  modified_base 7: mod_base = OTHER; note = 5-methyl cytidine
  modified_base 14: mod_base = OTHER; note = 5-methyl cytidine
  modified_base 18: mod_base = OTHER; note = 5-methyl cytidine
cgcactctgaggtctttcga

SEQ ID NO: 613 - DNA, 20 bp, synthetic construct
  source 1..20: mol_type = other DNA
  modified_base 1..20: mod_base = OTHER; note = Phosphorothioate linkage
  modified_base 1..5: mod_base = OTHER; note = 2'-O-(2-methoxyethyl) ribonucleotide
  misc_feature 1..5: note = RNA
  misc_feature 6..15: note = DNA
  misc_feature 16..20: note = RNA
  modified_base 16..20: mod_base = OTHER; note = 2'-O-(2-methoxyethyl) ribonucleotide
  modified_base 7: mod_base = OTHER; note = 5-methyl cytidine
  modified_base 14: mod_base = OTHER; note = 5-methyl cytidine
gggtttctatgtttcagggt

SEQ ID NO: 614 - DNA, 20 bp, synthetic construct
  source 1..20: mol_type = other DNA
  modified_base 1..20: mod_base = OTHER; note = Phosphorothioate linkage
  modified_base 1..5: mod_base = OTHER; note = 2'-O-(2-methoxyethyl) ribonucleotide
  misc_feature 1..5: note = RNA
  misc_feature 6..15: note = DNA
  misc_feature 16..20: note = RNA
  modified_base 16..20: mod_base = OTHER; note = 2'-O-(2-methoxyethyl) ribonucleotide
  modified_base 1: mod_base = OTHER; note = 5-methyl cytidine
  modified_base 9: mod_base = OTHER; note = 5-methyl cytidine
  modified_base 12: mod_base = OTHER; note = 5-methyl cytidine
cttttatgcttctggtttgg

SEQ ID NO: 615 - DNA, 20 bp, synthetic construct
  source 1..20: mol_type = other DNA
  modified_base 1..20: mod_base = OTHER; note = Phosphorothioate linkage
  modified_base 1..5: mod_base = OTHER; note = 2'-O-(2-methoxyethyl) ribonucleotide
  misc_feature 1..5: note = RNA
  misc_feature 6..15: note = DNA
  misc_feature 16..20: note = RNA
  modified_base 16..20: mod_base = OTHER; note = 2'-O-(2-methoxyethyl) ribonucleotide
  modified_base 11: mod_base = OTHER; note = 5-methyl cytidine
  modified_base 15: mod_base = OTHER; note = 5-methyl cytidine
gtgtggagatctttcttagg

SEQ ID NO: 616 - DNA, 20 bp, synthetic construct
  source 1..20: mol_type = other DNA
  modified_base 1..20: mod_base = OTHER; note = Phosphorothioate linkage
  modified_base 1..5: mod_base = OTHER; note = 2'-O-(2-methoxyethyl) ribonucleotide
  misc_feature 1..5: note = RNA
  misc_feature 6..15: note = DNA
  misc_feature 16..20: note = RNA
  modified_base 16..20: mod_base = OTHER; note = 2'-O-(2-methoxyethyl) ribonucleotide
  modified_base 4: mod_base = OTHER; note = 5-methyl cytidine
  modified_base 8: mod_base = OTHER; note = 5-methyl cytidine
ggtctttcagtatttgtgtg

SEQ ID NO: 617 - DNA, 20 bp, synthetic construct
  source 1..20: mol_type = other DNA
  modified_base 1..20: mod_base = OTHER; note = Phosphorothioate linkage
  modified_base 1..5: mod_base = OTHER; note = 2'-O-(2-methoxyethyl) ribonucleotide
  misc_feature 1..5: note = RNA
  misc_feature 6..15: note = DNA
  misc_feature 16..20: note = RNA
  modified_base 16..20: mod_base = OTHER; note = 2'-O-(2-methoxyethyl) ribonucleotide
  modified_base 6: mod_base = OTHER; note = 5-methyl cytidine
  modified_base 8: mod_base = OTHER; note = 5-methyl cytidine
  modified_base 14: mod_base = OTHER; note = 5-methyl cytidine
  modified_base 16..17: mod_base = OTHER; note = 5-methyl cytidine
  modified_base 19..20: mod_base = OTHER; note = 5-methyl cytidine
gttggctcttattctcctcc

SEQ ID NO: 618 - DNA, 20 bp, synthetic construct
  source 1..20: mol_type = other DNA
  modified_base 1..20: mod_base = OTHER; note = Phosphorothioate linkage
  modified_base 1..5: mod_base = OTHER; note = 2'-O-(2-methoxyethyl) ribonucleotide
  misc_feature 1..5: note = RNA
  misc_feature 6..15: note = DNA
  misc_feature 16..20: note = RNA
  modified_base 16..20: mod_base = OTHER; note = 2'-O-(2-methoxyethyl) ribonucleotide
  modified_base 2: mod_base = OTHER; note = 5-methyl cytidine
  modified_base 4: mod_base = OTHER; note = 5-methyl cytidine
  modified_base 6: mod_base = OTHER; note = 5-methyl cytidine
  modified_base 9: mod_base = OTHER; note = 5-methyl cytidine
  modified_base 11: mod_base = OTHER; note = 5-methyl cytidine
  modified_base 13: mod_base = OTHER; note = 5-methyl cytidine
  modified_base 15: mod_base = OTHER; note = 5-methyl cytidine
  modified_base 17: mod_base = OTHER; note = 5-methyl cytidine
  modified_base 19: mod_base = OTHER; note = 5-methyl cytidine
gctctcttcgctctcgctcg

SEQ ID NO: 619 - DNA, 20 bp, synthetic construct
  source 1..20: mol_type = other DNA
  modified_base 1..20: mod_base = OTHER; note = Phosphorothioate linkage
  modified_base 1..5: mod_base = OTHER; note = 2'-O-(2-methoxyethyl) ribonucleotide
  misc_feature 1..5: note = RNA
  misc_feature 6..15: note = DNA
  misc_feature 16..20: note = RNA
  modified_base 16..20: mod_base = OTHER; note = 2'-O-(2-methoxyethyl) ribonucleotide
  modified_base 1: mod_base = OTHER; note = 5-methyl cytidine
  modified_base 4: mod_base = OTHER; note = 5-methyl cytidine
  modified_base 10: mod_base = OTHER; note = 5-methyl cytidine
  modified_base 12: mod_base = OTHER; note = 5-methyl cytidine
  modified_base 14..16: mod_base = OTHER; note = 5-methyl cytidine
  modified_base 18..19: mod_base = OTHER; note = 5-methyl cytidine
ctgcagagtctctccctcct

SEQ ID NO: 620 - DNA, 20 bp, synthetic construct
  source 1..20: mol_type = other DNA
  modified_base 1..20: mod_base = OTHER; note = Phosphorothioate linkage
  modified_base 1..5: mod_base = OTHER; note = 2'-O-(2-methoxyethyl) ribonucleotide
  misc_feature 1..5: note = RNA
  misc_feature 6..15: note = DNA
  misc_feature 16..20: note = RNA
  modified_base 16..20: mod_base = OTHER; note = 2'-O-(2-methoxyethyl) ribonucleotide
  modified_base 1: mod_base = OTHER; note = 5-methyl cytidine
  modified_base 5: mod_base = OTHER; note = 5-methyl cytidine
  modified_base 7: mod_base = OTHER; note = 5-methyl cytidine
  modified_base 9: mod_base = OTHER; note = 5-methyl cytidine
  modified_base 11: mod_base = OTHER; note = 5-methyl cytidine
ctgtctctctctggtgtgtt

SEQ ID NO: 621 - DNA, 20 bp, synthetic construct
  source 1..20: mol_type = other DNA
  modified_base 1..20: mod_base = OTHER; note = Phosphorothioate linkage
  modified_base 1..5: mod_base = OTHER; note = 2'-O-(2-methoxyethyl) ribonucleotide
  misc_feature 1..5: note = RNA
  misc_feature 6..15: note = DNA
  misc_feature 16..20: note = RNA
  modified_base 16..20: mod_base = OTHER; note = 2'-O-(2-methoxyethyl) ribonucleotide
  modified_base 4..5: mod_base = OTHER; note = 5-methyl cytidine
  modified_base 6: mod_base = OTHER; note = 5-methyl cytidine
  modified_base 10: mod_base = OTHER; note = 5-methyl cytidine
  modified_base 12: mod_base = OTHER; note = 5-methyl cytidine
  modified_base 14: mod_base = OTHER; note = 5-methyl cytidine
  modified_base 16: mod_base = OTHER; note = 5-methyl cytidine
ggacctctgtctctctctgg

SEQ ID NO: 622 - DNA, 20 bp, synthetic construct
  source 1..20: mol_type = other DNA
  modified_base 1..20: mod_base = OTHER; note = Phosphorothioate linkage
  modified_base 1..5: mod_base = OTHER; note = 2'-O-(2-methoxyethyl) ribonucleotide
  misc_feature 1..5: note = RNA
  misc_feature 6..15: note = DNA
  misc_feature 16..20: note = RNA
  modified_base 16..20: mod_base = OTHER; note = 2'-O-(2-methoxyethyl) ribonucleotide
  modified_base 3: mod_base = OTHER; note = 5-methyl cytidine
  modified_base 10: mod_base = OTHER; note = 5-methyl cytidine
  modified_base 12: mod_base = OTHER; note = 5-methyl cytidine
  modified_base 14: mod_base = OTHER; note = 5-methyl cytidine
  modified_base 18: mod_base = OTHER; note = 5-methyl cytidine
  modified_base 20: mod_base = OTHER; note = 5-methyl cytidine
gtctagggtctctctgtctc

SEQ ID NO: 623 - DNA, 20 bp, synthetic construct
  source 1..20: mol_type = other DNA
  modified_base 1..20: mod_base = OTHER; note = Phosphorothioate linkage
  modified_base 1..5: mod_base = OTHER; note = 2'-O-(2-methoxyethyl) ribonucleotide
  misc_feature 1..5: note = RNA
  misc_feature 6..15: note = DNA
  misc_feature 16..20: note = RNA
  modified_base 16..20: mod_base = OTHER; note = 2'-O-(2-methoxyethyl) ribonucleotide
  modified_base 8: mod_base = OTHER; note = 5-methyl cytidine
  modified_base 15: mod_base = OTHER; note = 5-methyl cytidine
  modified_base 17: mod_base = OTHER; note = 5-methyl cytidine
  modified_base 19: mod_base = OTHER; note = 5-methyl cytidine
tgtgggtctagggtctctct

SEQ ID NO: 624 - DNA, 20 bp, synthetic construct
  source 1..20: mol_type = other DNA
  modified_base 1..20: mod_base = OTHER; note = Phosphorothioate linkage
  modified_base 1..5: mod_base = OTHER; note = 2'-O-(2-methoxyethyl) ribonucleotide
  misc_feature 1..5: note = RNA
  misc_feature 6..15: note = DNA
  misc_feature 16..20: note = RNA
  modified_base 16..20: mod_base = OTHER; note = 2'-O-(2-methoxyethyl) ribonucleotide
  modified_base 1: mod_base = OTHER; note = 5-methyl cytidine
  modified_base 5: mod_base = OTHER; note = 5-methyl cytidine
  modified_base 7: mod_base = OTHER; note = 5-methyl cytidine
  modified_base 15: mod_base = OTHER; note = 5-methyl cytidine
ctttctctgtgggtctaggg

SEQ ID NO: 625 - DNA, 20 bp, synthetic construct
  source 1..20: mol_type = other DNA
  modified_base 1..20: mod_base = OTHER; note = Phosphorothioate linkage
  modified_base 1..5: mod_base = OTHER; note = 2'-O-(2-methoxyethyl) ribonucleotide
  misc_feature 1..5: note = RNA
  misc_feature 6..15: note = DNA
  misc_feature 16..20: note = RNA
  modified_base 16..20: mod_base = OTHER; note = 2'-O-(2-methoxyethyl) ribonucleotide
  modified_base 8: mod_base = OTHER; note = 5-methyl cytidine
  modified_base 12: mod_base = OTHER; note = 5-methyl cytidine
  modified_base 14: mod_base = OTHER; note = 5-methyl cytidine
gaagtatctttctctgtggg

SEQ ID NO: 626 - DNA, 20 bp, synthetic construct
  source 1..20: mol_type = other DNA
  modified_base 1..20: mod_base = OTHER; note = Phosphorothioate linkage
  modified_base 1..5: mod_base = OTHER; note = 2'-O-(2-methoxyethyl) ribonucleotide
  misc_feature 1..5: note = RNA
  misc_feature 6..15: note = DNA
  misc_feature 16..20: note = RNA
  modified_base 16..20: mod_base = OTHER; note = 2'-O-(2-methoxyethyl) ribonucleotide
  modified_base 15: mod_base = OTHER; note = 5-methyl cytidine
  modified_base 19: mod_base = OTHER; note = 5-methyl cytidine
gggtggtgaagtatctttct

SEQ ID NO: 627 - DNA, 20 bp, synthetic construct
  source 1..20: mol_type = other DNA
  modified_base 1..20: mod_base = OTHER; note = Phosphorothioate linkage
  modified_base 1..5: mod_base = OTHER; note = 2'-O-(2-methoxyethyl) ribonucleotide
  misc_feature 1..5: note = RNA
  misc_feature 6..15: note = DNA
  misc_feature 16..20: note = RNA
  modified_base 16..20: mod_base = OTHER; note = 2'-O-(2-methoxyethyl) ribonucleotide
  modified_base 3..5: mod_base = OTHER; note = 5-methyl cytidine
  modified_base 11: mod_base = OTHER; note = 5-methyl cytidine
  modified_base 13: mod_base = OTHER; note = 5-methyl cytidine
  modified_base 20: mod_base = OTHER; note = 5-methyl cytidine
ggccctgtgtctcaaattac

SEQ ID NO: 628 - DNA, 20 bp, synthetic construct
  source 1..20: mol_type = other DNA
  modified_base 1..20: mod_base = OTHER; note = Phosphorothioate linkage
  modified_base 1..5: mod_base = OTHER; note = 2'-O-(2-methoxyethyl) ribonucleotide
  misc_feature 1..5: note = RNA
  misc_feature 6..15: note = DNA
  misc_feature 16..20: note = RNA
  modified_base 16..20: mod_base = OTHER; note = 2'-O-(2-methoxyethyl) ribonucleotide
  modified_base 9..11: mod_base = OTHER; note = 5-methyl cytidine
  modified_base 17: mod_base = OTHER; note = 5-methyl cytidine
  modified_base 19: mod_base = OTHER; note = 5-methyl cytidine
gattttggccctgtgtctca

SEQ ID NO: 629 - DNA, 20 bp, synthetic construct
  source 1..20: mol_type = other DNA
  modified_base 1..20: mod_base = OTHER; note = Phosphorothioate linkage
  modified_base 1..5: mod_base = OTHER; note = 2'-O-(2-methoxyethyl) ribonucleotide
  misc_feature 1..5: note = RNA
  misc_feature 6..15: note = DNA
  misc_feature 16..20: note = RNA
  modified_base 16..20: mod_base = OTHER; note = 2'-O-(2-methoxyethyl) ribonucleotide
  modified_base 1..2: mod_base = OTHER; note = 5-methyl cytidine
  modified_base 4: mod_base = OTHER; note = 5-methyl cytidine
  modified_base 15..17: mod_base = OTHER; note = 5-methyl cytidine
cctctagattttggccctgt

SEQ ID NO: 630 - DNA, 20 bp, synthetic construct
  source 1..20: mol_type = other DNA
  modified_base 1..20: mod_base = OTHER; note = Phosphorothioate linkage
  modified_base 1..5: mod_base = OTHER; note = 2'-O-(2-methoxyethyl) ribonucleotide
  misc_feature 1..5: note = RNA
  misc_feature 6..15: note = DNA
  misc_feature 16..20: note = RNA
  modified_base 16..20: mod_base = OTHER; note = 2'-O-(2-methoxyethyl) ribonucleotide
  modified_base 1: mod_base = OTHER; note = 5-methyl cytidine
  modified_base 17..19: mod_base = OTHER; note = 5-methyl cytidine
ctgtaggtatggagaaccct

SEQ ID NO: 631 - DNA, 20 bp, synthetic construct
  source 1..20: mol_type = other DNA
  modified_base 1..20: mod_base = OTHER; note = Phosphorothioate linkage
  modified_base 1..5: mod_base = OTHER; note = 2'-O-(2-methoxyethyl) ribonucleotide
  misc_feature 1..5: note = RNA
  misc_feature 6..15: note = DNA
  misc_feature 16..20: note = RNA
  modified_base 16..20: mod_base = OTHER; note = 2'-O-(2-methoxyethyl) ribonucleotide
  modified_base 2: mod_base = OTHER; note = 5-methyl cytidine
  modified_base 6: mod_base = OTHER; note = 5-methyl cytidine
  modified_base 8: mod_base = OTHER; note = 5-methyl cytidine
  modified_base 12: mod_base = OTHER; note = 5-methyl cytidine
  modified_base 18: mod_base = OTHER; note = 5-methyl cytidine
tctggctctttctgaatctg

SEQ ID NO: 632 - DNA, 20 bp, synthetic construct
  source 1..20: mol_type = other DNA
  modified_base 1..20: mod_base = OTHER; note = Phosphorothioate linkage
  modified_base 1..5: mod_base = OTHER; note = 2'-O-(2-methoxyethyl) ribonucleotide
  misc_feature 1..5: note = RNA
  misc_feature 6..15: note = DNA
  misc_feature 16..20: note = RNA
  modified_base 16..20: mod_base = OTHER; note = 2'-O-(2-methoxyethyl) ribonucleotide
  modified_base 1: mod_base = OTHER; note = 5-methyl cytidine
  modified_base 4: mod_base = OTHER; note = 5-methyl cytidine
  modified_base 7: mod_base = OTHER; note = 5-methyl cytidine
  modified_base 11: mod_base = OTHER; note = 5-methyl cytidine
  modified_base 13: mod_base = OTHER; note = 5-methyl cytidine
  modified_base 17: mod_base = OTHER; note = 5-methyl cytidine
ctacatctggctctttctga

SEQ ID NO: 633 - DNA, 20 bp, synthetic construct
  source 1..20: mol_type = other DNA
  modified_base 1..20: mod_base = OTHER; note = Phosphorothioate linkage
  modified_base 1..5: mod_base = OTHER; note = 2'-O-(2-methoxyethyl) ribonucleotide
  misc_feature 1..5: note = RNA
  misc_feature 6..15: note = DNA
  misc_feature 16..20: note = RNA
  modified_base 16..20: mod_base = OTHER; note = 2'-O-(2-methoxyethyl) ribonucleotide
  modified_base 2: mod_base = OTHER; note = 5-methyl cytidine
  modified_base 4..6: mod_base = OTHER; note = 5-methyl cytidine
  modified_base 9..10: mod_base = OTHER; note = 5-methyl cytidine
  modified_base 15: mod_base = OTHER; note = 5-methyl cytidine
  modified_base 20: mod_base = OTHER; note = 5-methyl cytidine
gggtctctttctaggtctga

SEQ ID NO: 634 - DNA, 20 bp, synthetic construct
  source 1..20: mol_type = other DNA
  modified_base 1..20: mod_base = OTHER; note = Phosphorothioate linkage
  modified_base 1..5: mod_base = OTHER; note = 2'-O-(2-methoxyethyl) ribonucleotide
  misc_feature 1..5: note = RNA
  misc_feature 6..15: note = DNA
  misc_feature 16..20: note = RNA
  modified_base 16..20: mod_base = OTHER; note = 2'-O-(2-methoxyethyl) ribonucleotide
  modified_base 3: mod_base = OTHER; note = 5-methyl cytidine
  modified_base 12: mod_base = OTHER; note = 5-methyl cytidine
  modified_base 14: mod_base = OTHER; note = 5-methyl cytidine
  modified_base 18: mod_base = OTHER; note = 5-methyl cytidine
  modified_base 20: mod_base = OTHER; note = 5-methyl cytidine
gtcaggagtgtctctgtctc

SEQ ID NO: 635 - DNA, 20 bp, synthetic construct
  source 1..20: mol_type = other DNA
  modified_base 1..20: mod_base = OTHER; note = Phosphorothioate linkage
  modified_base 1..5: mod_base = OTHER; note = 2'-O-(2-methoxyethyl) ribonucleotide
  misc_feature 1..5: note = RNA
  misc_feature 6..15: note = DNA
  misc_feature 16..20: note = RNA
  modified_base 16..20: mod_base = OTHER; note = 2'-O-(2-methoxyethyl) ribonucleotide
  modified_base 2: mod_base = OTHER; note = 5-methyl cytidine
  modified_base 9: mod_base = OTHER; note = 5-methyl cytidine
  modified_base 11: mod_base = OTHER; note = 5-methyl cytidine
  modified_base 15: mod_base = OTHER; note = 5-methyl cytidine
  modified_base 17..20: mod_base = OTHER; note = 5-methyl cytidine
gctgaagtctctatctcccc

SEQ ID NO: 636 - DNA, 20 bp, synthetic construct
  source 1..20: mol_type = other DNA
  modified_base 1..20: mod_base = OTHER; note = Phosphorothioate linkage
  modified_base 1..5: mod_base = OTHER; note = 2'-O-(2-methoxyethyl) ribonucleotide
  misc_feature 1..5: note = RNA
  misc_feature 6..15: note = DNA
  misc_feature 16..20: note = RNA
  modified_base 16..20: mod_base = OTHER; note = 2'-O-(2-methoxyethyl) ribonucleotide
  modified_base 2: mod_base = OTHER; note = 5-methyl cytidine
  modified_base 4..5: mod_base = OTHER; note = 5-methyl cytidine
  modified_base 13: mod_base = OTHER; note = 5-methyl cytidine
  modified_base 20: mod_base = OTHER; note = 5-methyl cytidine
tctccggaccagctgaagtc

SEQ ID NO: 637 - DNA, 20 bp, synthetic construct
  source 1..20: mol_type = other DNA
  modified_base 1..20: mod_base = OTHER; note = Phosphorothioate linkage
  modified_base 1..5: mod_base = OTHER; note = 2'-O-(2-methoxyethyl) ribonucleotide
  misc_feature 1..5: note = RNA
  misc_feature 6..15: note = DNA
  misc_feature 16..20: note = RNA
  modified_base 16..20: mod_base = OTHER; note = 2'-O-(2-methoxyethyl) ribonucleotide
  modified_base 5: mod_base = OTHER; note = 5-methyl cytidine
  modified_base 7: mod_base = OTHER; note = 5-methyl cytidine
  modified_base 16..17: mod_base = OTHER; note = 5-methyl cytidine
  modified_base 20: mod_base = OTHER; note = 5-methyl cytidine
gggtctctgagttgtccatc

SEQ ID NO: 638 - DNA, 20 bp, synthetic construct
  source 1..20: mol_type = other DNA
  modified_base 1..20: mod_base = OTHER; note = Phosphorothioate linkage
  modified_base 1..5: mod_base = OTHER; note = 2'-O-(2-methoxyethyl) ribonucleotide
  misc_feature 1..5: note = RNA
  misc_feature 6..15: note = DNA
  misc_feature 16..20: note = RNA
  modified_base 16..20: mod_base = OTHER; note = 2'-O-(2-methoxyethyl) ribonucleotide
  modified_base 4: mod_base = OTHER; note = 5-methyl cytidine
  modified_base 6: mod_base = OTHER; note = 5-methyl cytidine
  modified_base 8: mod_base = OTHER; note = 5-methyl cytidine
  modified_base 10: mod_base = OTHER; note = 5-methyl cytidine
  modified_base 17: mod_base = OTHER; note = 5-methyl cytidine
ggtcgcactctgaggtcttt

SEQ ID NO: 639 - DNA, 20 bp, synthetic construct
  source 1..20: mol_type = other DNA
  modified_base 1..20: mod_base = OTHER; note = Phosphorothioate linkage
  modified_base 1..5: mod_base = OTHER; note = 2'-O-(2-methoxyethyl) ribonucleotide
  misc_feature 1..5: note = RNA
  misc_feature 6..15: note = DNA
  misc_feature 16..20: note = RNA
  modified_base 16..20: mod_base = OTHER; note = 2'-O-(2-methoxyethyl) ribonucleotide
  modified_base 5: mod_base = OTHER; note = 5-methyl cytidine
  modified_base 12: mod_base = OTHER; note = 5-methyl cytidine
  modified_base 14: mod_base = OTHER; note = 5-methyl cytidine
  modified_base 16: mod_base = OTHER; note = 5-methyl cytidine
  modified_base 18: mod_base = OTHER; note = 5-methyl cytidine
gggtctgtggtcgcactctg

SEQ ID NO: 640 - DNA, 20 bp, synthetic construct
  source 1..20: mol_type = other DNA
  modified_base 1..20: mod_base = OTHER; note = Phosphorothioate linkage
  modified_base 1..5: mod_base = OTHER; note = 2'-O-(2-methoxyethyl) ribonucleotide
  misc_feature 1..5: note = RNA
  misc_feature 6..15: note = DNA
  misc_feature 16..20: note = RNA
  modified_base 16..20: mod_base = OTHER; note = 2'-O-(2-methoxyethyl) ribonucleotide
  modified_base 5: mod_base = OTHER; note = 5-methyl cytidine
  modified_base 11: mod_base = OTHER; note = 5-methyl cytidine
  modified_base 18: mod_base = OTHER; note = 5-methyl cytidine
  modified_base 20: mod_base = OTHER; note = 5-methyl cytidine
gtttcagggtctgtggtcgc

SEQ ID NO: 641 - DNA, 20 bp, synthetic construct
  source 1..20: mol_type = other DNA
  modified_base 1..20: mod_base = OTHER; note = Phosphorothioate linkage
  modified_base 1..5: mod_base = OTHER; note = 2'-O-(2-methoxyethyl) ribonucleotide
  misc_feature 1..5: note = RNA
  misc_feature 6..15: note = DNA
  misc_feature 16..20: note = RNA
  modified_base 16..20: mod_base = OTHER; note = 2'-O-(2-methoxyethyl) ribonucleotide
  modified_base 2: mod_base = OTHER; note = 5-methyl cytidine
  modified_base 10: mod_base = OTHER; note = 5-methyl cytidine
  modified_base 16: mod_base = OTHER; note = 5-methyl cytidine
tctatgtttcagggtctgtg

SEQ ID NO: 642 - DNA, 20 bp, synthetic construct
  source 1..20: mol_type = other DNA
  modified_base 1..20: mod_base = OTHER; note = Phosphorothioate linkage
  modified_base 1..5: mod_base = OTHER; note = 2'-O-(2-methoxyethyl) ribonucleotide
  misc_feature 1..5: note = RNA
  misc_feature 6..15: note = DNA
  misc_feature 16..20: note = RNA
  modified_base 16..20: mod_base = OTHER; note = 2'-O-(2-methoxyethyl) ribonucleotide
  modified_base 5: mod_base = OTHER; note = 5-methyl cytidine
ttttcagattttgatattga

SEQ ID NO: 643 - DNA, 20 bp, synthetic construct
  source 1..20: mol_type = other DNA
  modified_base 1..20: mod_base = OTHER; note = Phosphorothioate linkage
  modified_base 1..5: mod_base = OTHER; note = 2'-O-(2-methoxyethyl) ribonucleotide
  misc_feature 1..5: note = RNA
  misc_feature 6..15: note = DNA
  misc_feature 16..20: note = RNA
  modified_base 16..20: mod_base = OTHER; note = 2'-O-(2-methoxyethyl) ribonucleotide
  modified_base 1..2: mod_base = OTHER; note = 5-methyl cytidine
  modified_base 9: mod_base = OTHER; note = 5-methyl cytidine
  modified_base 12: mod_base = OTHER; note = 5-methyl cytidine
  modified_base 15: mod_base = OTHER; note = 5-methyl cytidine
  modified_base 17: mod_base = OTHER; note = 5-methyl cytidine
cctgaaatcatcatctcagg

SEQ ID NO: 644 - DNA, 20 bp, synthetic construct
  source 1..20: mol_type = other DNA
  modified_base 1..20: mod_base = OTHER; note = Phosphorothioate linkage
  modified_base 1..5: mod_base = OTHER; note = 2'-O-(2-methoxyethyl) ribonucleotide
  misc_feature 1..5: note = RNA
  misc_feature 6..15: note = DNA
  misc_feature 16..20: note = RNA
  modified_base 16..20: mod_base = OTHER; note = 2'-O-(2-methoxyethyl) ribonucleotide
  modified_base 13..14: mod_base = OTHER; note = 5-methyl cytidine
aggattgagtttccttttat

SEQ ID NO: 645 - DNA, 20 bp, synthetic construct
  source 1..20: mol_type = other DNA
  modified_base 1..20: mod_base = OTHER; note = Phosphorothioate linkage
  modified_base 1..5: mod_base = OTHER; note = 2'-O-(2-methoxyethyl) ribonucleotide
  misc_feature 1..5: note = RNA
  misc_feature 6..15: note = DNA
  misc_feature 16..20: note = RNA
  modified_base 16..20: mod_base = OTHER; note = 2'-O-(2-methoxyethyl) ribonucleotide
  modified_base 6: mod_base = OTHER; note = 5-methyl cytidine
  modified_base 10: mod_base = OTHER; note = 5-methyl cytidine
gagatctttcttaggattga

SEQ ID NO: 646 - DNA, 20 bp, synthetic construct
  source 1..20: mol_type = other DNA
  modified_base 1..20: mod_base = OTHER; note = Phosphorothioate linkage
  modified_base 1..5: mod_base = OTHER; note = 2'-O-(2-methoxyethyl) ribonucleotide
  misc_feature 1..5: note = RNA
  misc_feature 6..15: note = DNA
  misc_feature 16..20: note = RNA
  modified_base 16..20: mod_base = OTHER; note = 2'-O-(2-methoxyethyl) ribonucleotide
  modified_base 1: mod_base = OTHER; note = 5-methyl cytidine
  modified_base 3: mod_base = OTHER; note = 5-methyl cytidine
  modified_base 9: mod_base = OTHER; note = 5-methyl cytidine
  modified_base 16: mod_base = OTHER; note = 5-methyl cytidine
ctctgagacagatttcggag

SEQ ID NO: 647 - RNA, 20 nt, synthetic construct
  source 1..20: mol_type = other RNA
  modified_base 1..20: mod_base = OTHER; note = Phosphorothioate linkage
  modified_base 1..20: mod_base = OTHER; note = 2'-O-(2-methoxyethyl) ribonucleotide
  modified_base 1: mod_base = OTHER; note = 5-methyl cytidine
  modified_base 7: mod_base = OTHER; note = 5-methyl cytidine
  modified_base 9: mod_base = OTHER; note = 5-methyl cytidine
  modified_base 15: mod_base = OTHER; note = 5-methyl cytidine
  modified_base 17..18: mod_base = OTHER; note = 5-methyl cytidine
  modified_base 20: mod_base = OTHER; note = 5-methyl cytidine
cgttggctcttattctcctc

SEQ ID NO: 648 - RNA, 20 nt, synthetic construct
  source 1..20: mol_type = other RNA
  modified_base 1..20: mod_base = OTHER; note = Phosphorothioate linkage
  modified_base 1..20: mod_base = OTHER; note = 2'-O-(2-methoxyethyl) ribonucleotide
  modified_base 1: mod_base = OTHER; note = 5-methyl cytidine
  modified_base 3: mod_base = OTHER; note = 5-methyl cytidine
  modified_base 5: mod_base = OTHER; note = 5-methyl cytidine
ctctctggtgtgtttttgag

SEQ ID NO: 649 - RNA, 20 nt, synthetic construct
  source 1..20: mol_type = other RNA
  modified_base 1..20: mod_base = OTHER; note = Phosphorothioate linkage
  modified_base 1..20: mod_base = OTHER; note = 2'-O-(2-methoxyethyl) ribonucleotide
  modified_base 3: mod_base = OTHER; note = 5-methyl cytidine
  modified_base 6: mod_base = OTHER; note = 5-methyl cytidine
  modified_base 14..15: mod_base = OTHER; note = 5-methyl cytidine
  modified_base 17: mod_base = OTHER; note = 5-methyl cytidine
tgcatctttaggacctctgt

SEQ ID NO: 650 - RNA, 20 nt, synthetic construct
  source 1..20: mol_type = other RNA
  modified_base 1..20: mod_base = OTHER; note = Phosphorothioate linkage
  modified_base 1..20: mod_base = OTHER; note = 2'-O-(2-methoxyethyl) ribonucleotide
  modified_base 14: mod_base = OTHER; note = 5-methyl cytidine
  modified_base 18: mod_base = OTHER; note = 5-methyl cytidine
  modified_base 20: mod_base = OTHER; note = 5-methyl cytidine
ggtggtgaagtatctttctc

SEQ ID NO: 651 - RNA, 20 nt, synthetic construct
  source 1..20: mol_type = other RNA
  modified_base 1..20: mod_base = OTHER; note = Phosphorothioate linkage
  modified_base 1..20: mod_base = OTHER; note = 2'-O-(2-methoxyethyl) ribonucleotide
  modified_base 3: mod_base = OTHER; note = 5-methyl cytidine
  modified_base 5: mod_base = OTHER; note = 5-methyl cytidine
  modified_base 12..15: mod_base = OTHER; note = 5-methyl cytidine
  modified_base 17: mod_base = OTHER; note = 5-methyl cytidine
gtctcaaattaccccacagt

SEQ ID NO: 652 - RNA, 20 nt, synthetic construct
  source 1..20: mol_type = other RNA
  modified_base 1..20: mod_base = OTHER; note = Phosphorothioate linkage
  modified_base 1..20: mod_base = OTHER; note = 2'-O-(2-methoxyethyl) ribonucleotide
  modified_base 10..12: mod_base = OTHER; note = 5-methyl cytidine
  modified_base 18: mod_base = OTHER; note = 5-methyl cytidine
  modified_base 20: mod_base = OTHER; note = 5-methyl cytidine
agattttggccctgtgtctc

SEQ ID NO: 653 - RNA, 20 nt, synthetic construct
  source 1..20: mol_type = other RNA
  modified_base 1..20: mod_base = OTHER; note = Phosphorothioate linkage
  modified_base 1..20: mod_base = OTHER; note = 2'-O-(2-methoxyethyl) ribonucleotide
  modified_base 5: mod_base = OTHER; note = 5-methyl cytidine
  modified_base 7: mod_base = OTHER; note = 5-methyl cytidine
  modified_base 12..13: mod_base = OTHER; note = 5-methyl cytidine
  modified_base 15: mod_base = OTHER; note = 5-methyl cytidine
gagtctcttttcctctagat

SEQ ID NO: 654 - RNA, 20 nt, synthetic construct
  source 1..20: mol_type = other RNA
  modified_base 1..20: mod_base = OTHER; note = Phosphorothioate linkage
  modified_base 1..20: mod_base = OTHER; note = 2'-O-(2-methoxyethyl) ribonucleotide
  modified_base 4: mod_base = OTHER; note = 5-methyl cytidine
  modified_base 12..13: mod_base = OTHER; note = 5-methyl cytidine
  modified_base 15: mod_base = OTHER; note = 5-methyl cytidine
  modified_base 20: mod_base = OTHER; note = 5-methyl cytidine
ggtcgttttttcctcaaatc

SEQ ID NO: 655 - RNA, 20 nt, synthetic construct
  source 1..20: mol_type = other RNA
  modified_base 1..20: mod_base = OTHER; note = Phosphorothioate linkage
  modified_base 1..20: mod_base = OTHER; note = 2'-O-(2-methoxyethyl) ribonucleotide
  modified_base 11: mod_base = OTHER; note = 5-methyl cytidine
  modified_base 14: mod_base = OTHER; note = 5-methyl cytidine
  modified_base 16: mod_base = OTHER; note = 5-methyl cytidine
  modified_base 18: mod_base = OTHER; note = 5-methyl cytidine
  modified_base 20: mod_base = OTHER; note = 5-methyl cytidine
tgatattgagcttctctctc

SEQ ID NO: 656 - RNA, 20 nt, synthetic construct
  source 1..20: mol_type = other RNA
  modified_base 1..20: mod_base = OTHER; note = Phosphorothioate linkage
  modified_base 1..20: mod_base = OTHER; note = 2'-O-(2-methoxyethyl) ribonucleotide
  modified_base 15..17: mod_base = OTHER; note = 5-methyl cytidine
gtaggtatggagaacccttt

SEQ ID NO: 657 - RNA, 20 nt, synthetic construct
  source 1..20: mol_type = other RNA
  modified_base 1..20: mod_base = OTHER; note = Phosphorothioate linkage
  modified_base 1..20: mod_base = OTHER; note = 2'-O-(2-methoxyethyl) ribonucleotide
  modified_base 6: mod_base = OTHER; note = 5-methyl cytidine
  modified_base 15: mod_base = OTHER; note = 5-methyl cytidine
ggagtctaagatatctgtag

SEQ ID NO: 658 - RNA, 20 nt, synthetic construct
  source 1..20: mol_type = other RNA
  modified_base 1..20: mod_base = OTHER; note = Phosphorothioate linkage
  modified_base 1..20: mod_base = OTHER; note = 2'-O-(2-methoxyethyl) ribonucleotide
  modified_base 5: mod_base = OTHER; note = 5-methyl cytidine
  modified_base 11: mod_base = OTHER; note = 5-methyl cytidine
  modified_base 13: mod_base = OTHER; note = 5-methyl cytidine
  modified_base 18..19: mod_base = OTHER; note = 5-methyl cytidine
gagtctaggtctcaggtcct

SEQ ID NO: 659 - RNA, 20 nt, synthetic construct
  source 1..20: mol_type = other RNA
  modified_base 1..20: mod_base = OTHER; note = Phosphorothioate linkage
  modified_base 1..20: mod_base = OTHER; note = 2'-O-(2-methoxyethyl) ribonucleotide
  modified_base 2: mod_base = OTHER; note = 5-methyl cytidine
  modified_base 4: mod_base = OTHER; note = 5-methyl cytidine
  modified_base 10: mod_base = OTHER; note = 5-methyl cytidine
  modified_base 13: mod_base = OTHER; note = 5-methyl cytidine
  modified_base 16: mod_base = OTHER; note = 5-methyl cytidine
  modified_base 20: mod_base = OTHER; note = 5-methyl cytidine
gctctaattctacatctggc

SEQ ID NO: 660 - RNA, 20 nt, synthetic construct
  source 1..20: mol_type = other RNA
  modified_base 1..20: mod_base = OTHER; note = Phosphorothioate linkage
  modified_base 1..20: mod_base = OTHER; note = 2'-O-(2-methoxyethyl) ribonucleotide
  modified_base 1: mod_base = OTHER; note = 5-methyl cytidine
  modified_base 7: mod_base = OTHER; note = 5-methyl cytidine
  modified_base 14: mod_base = OTHER; note = 5-methyl cytidine
  modified_base 16: mod_base = OTHER; note = 5-methyl cytidine
ctaggtctgagttctctaag

SEQ ID NO: 661 - RNA, 20 nt, synthetic construct
  source 1..20: mol_type = other RNA
  modified_base 1..20: mod_base = OTHER; note = Phosphorothioate linkage
  modified_base 1..20: mod_base = OTHER; note = 2'-O-(2-methoxyethyl) ribonucleotide
  modified_base 3: mod_base = OTHER; note = 5-methyl cytidine
  modified_base 5: mod_base = OTHER; note = 5-methyl cytidine
  modified_base 14: mod_base = OTHER; note = 5-methyl cytidine
  modified_base 18: mod_base = OTHER; note = 5-methyl cytidine
  modified_base 20: mod_base = OTHER; note = 5-methyl cytidine
gtctctaagttatcagtctc

SEQ ID NO: 662 - RNA, 20 nt, synthetic construct
  source 1..20: mol_type = other RNA
  modified_base 1..20: mod_base = OTHER; note = Phosphorothioate linkage
  modified_base 1..20: mod_base = OTHER; note = 2'-O-(2-methoxyethyl) ribonucleotide
  modified_base 6: mod_base = OTHER; note = 5-methyl cytidine
  modified_base 15: mod_base = OTHER; note = 5-methyl cytidine
  modified_base 17: mod_base = OTHER; note = 5-methyl cytidine
taagtcaggagtgtctctgt

SEQ ID NO: 663 - RNA, 20 nt, synthetic construct
  source 1..20: mol_type = other RNA
  modified_base 1..20: mod_base = OTHER; note = Phosphorothioate linkage
  modified_base 1..20: mod_base = OTHER; note = 2'-O-(2-methoxyethyl) ribonucleotide
  modified_base 3: mod_base = OTHER; note = 5-methyl cytidine
  modified_base 5: mod_base = OTHER; note = 5-methyl cytidine
  modified_base 9: mod_base = OTHER; note = 5-methyl cytidine
  modified_base 11..14: mod_base = OTHER; note = 5-methyl cytidine
gtctctatctccccttaagt

SEQ ID NO: 664 - RNA, 20 nt, synthetic construct
  source 1..20: mol_type = other RNA
  modified_base 1..20: mod_base = OTHER; note = Phosphorothioate linkage
  modified_base 1..20: mod_base = OTHER; note = 2'-O-(2-methoxyethyl) ribonucleotide
  modified_base 3: mod_base = OTHER; note = 5-methyl cytidine
  modified_base 5..6: mod_base = OTHER; note = 5-methyl cytidine
  modified_base 10..11: mod_base = OTHER; note = 5-methyl cytidine
  modified_base 14: mod_base = OTHER; note = 5-methyl cytidine
atctccggaccagctgaagt

SEQ ID NO: 665 - RNA, 20 nt, synthetic construct
  source 1..20: mol_type = other RNA
  modified_base 1..20: mod_base = OTHER; note = Phosphorothioate linkage
  modified_base 1..20: mod_base = OTHER; note = 2'-O-(2-methoxyethyl) ribonucleotide
  modified_base 3: mod_base = OTHER; note = 5-methyl cytidine
  modified_base 5: mod_base = OTHER; note = 5-methyl cytidine
  modified_base 14..15: mod_base = OTHER; note = 5-methyl cytidine
  modified_base 18: mod_base = OTHER; note = 5-methyl cytidine
  modified_base 20: mod_base = OTHER; note = 5-methyl cytidine
gtctctgagttgtccatctc

SEQ ID NO: 666 - RNA, 20 nt, synthetic construct
  source 1..20: mol_type = other RNA
  modified_base 1..20: mod_base = OTHER; note = Phosphorothioate linkage
  modified_base 1..20: mod_base = OTHER; note = 2'-O-(2-methoxyethyl) ribonucleotide
  modified_base 2: mod_base = OTHER; note = 5-methyl cytidine
  modified_base 5: mod_base = OTHER; note = 5-methyl cytidine
  modified_base 19: mod_base = OTHER; note = 5-methyl cytidine
tcttcatgaattttgggtct

SEQ ID NO: 667 - RNA, 20 nt, synthetic construct
  source 1..20: mol_type = other RNA
  modified_base 1..20: mod_base = OTHER; note = Phosphorothioate linkage
  modified_base 1..20: mod_base = OTHER; note = 2'-O-(2-methoxyethyl) ribonucleotide
  modified_base 1: mod_base = OTHER; note = 5-methyl cytidine
  modified_base 3: mod_base = OTHER; note = 5-methyl cytidine
  modified_base 5: mod_base = OTHER; note = 5-methyl cytidine
  modified_base 7: mod_base = OTHER; note = 5-methyl cytidine
  modified_base 14: mod_base = OTHER; note = 5-methyl cytidine
  modified_base 18: mod_base = OTHER; note = 5-methyl cytidine
cgcactctgaggtctttcga

SEQ ID NO: 668 - RNA, 20 nt, synthetic construct
  source 1..20: mol_type = other RNA
  modified_base 1..20: mod_base = OTHER; note = Phosphorothioate linkage
  modified_base 1..20: mod_base = OTHER; note = 2'-O-(2-methoxyethyl) ribonucleotide
  modified_base 7: mod_base = OTHER; note = 5-methyl cytidine
  modified_base 15: mod_base = OTHER; note = 5-methyl cytidine
gggtttctatgtttcagggt

SEQ ID NO: 669 - RNA, 20 nt, synthetic construct
  source 1..20: mol_type = other RNA
  modified_base 1..20: mod_base = OTHER; note = Phosphorothioate linkage
  modified_base 1..20: mod_base = OTHER; note = 2'-O-(2-methoxyethyl) ribonucleotide
  modified_base 1: mod_base = OTHER; note = 5-methyl cytidine
  modified_base 9: mod_base = OTHER; note = 5-methyl cytidine
  modified_base 12: mod_base = OTHER; note = 5-methyl cytidine
cttttatgcttctggtttgg

SEQ ID NO: 670 - RNA, 20 nt, synthetic construct
  source 1..20: mol_type = other RNA
  modified_base 1..20: mod_base = OTHER; note = Phosphorothioate linkage
  modified_base 1..20: mod_base = OTHER; note = 2'-O-(2-methoxyethyl) ribonucleotide
  modified_base 11: mod_base = OTHER; note = 5-methyl cytidine
  modified_base 15: mod_base = OTHER; note = 5-methyl cytidine
gtgtggagatctttcttagg

SEQ ID NO: 671 - RNA, 20 nt, synthetic construct
  source 1..20: mol_type = other RNA
  modified_base 1..20: mod_base = OTHER; note = Phosphorothioate linkage
  modified_base 1..20: mod_base = OTHER; note = 2'-O-(2-methoxyethyl) ribonucleotide
  modified_base 4: mod_base = OTHER; note = 5-methyl cytidine
  modified_base 8: mod_base = OTHER; note = 5-methyl cytidine
ggtctttcagtatttgtgtg

SEQ ID NO: 672 - RNA, 20 nt, synthetic construct
  source 1..20: mol_type = other RNA
  modified_base 1..20: mod_base = OTHER; note = Phosphorothioate linkage
  modified_base 1..20: mod_base = OTHER; note = 2'-O-(2-methoxyethyl) ribonucleotide
  modified_base 6: mod_base = OTHER; note = 5-methyl cytidine
  modified_base 8: mod_base = OTHER; note = 5-methyl cytidine
  modified_base 14: mod_base = OTHER; note = 5-methyl cytidine
  modified_base 16..17: mod_base = OTHER; note = 5-methyl cytidine
  modified_base 19..20: mod_base = OTHER; note = 5-methyl cytidine
gttggctcttattctcctcc

SEQ ID NO: 673 - RNA, 20 nt, synthetic construct
  source 1..20: mol_type = other RNA
  modified_base 1..20: mod_base = OTHER; note = Phosphorothioate linkage
  modified_base 1..20: mod_base = OTHER; note = 2'-O-(2-methoxyethyl) ribonucleotide
  modified_base 2: mod_base = OTHER; note = 5-methyl cytidine
  modified_base 4: mod_base = OTHER; note = 5-methyl cytidine
  modified_base 6: mod_base = OTHER; note = 5-methyl cytidine
  modified_base 9: mod_base = OTHER; note = 5-methyl cytidine
  modified_base 11: mod_base = OTHER; note = 5-methyl cytidine
  modified_base 13: mod_base = OTHER; note = 5-methyl cytidine
  modified_base 15: mod_base = OTHER; note = 5-methyl cytidine
  modified_base 17: mod_base = OTHER; note = 5-methyl cytidine
  modified_base 19: mod_base = OTHER; note = 5-methyl cytidine
gctctcttcgctctcgctcg

SEQ ID NO: 674 - RNA, 20 nt, synthetic construct
  source 1..20: mol_type = other RNA
  modified_base 1..20: mod_base = OTHER; note = Phosphorothioate linkage
  modified_base 1..20: mod_base = OTHER; note = 2'-O-(2-methoxyethyl) ribonucleotide
  modified_base 1: mod_base = OTHER; note = 5-methyl cytidine
  modified_base 4: mod_base = OTHER; note = 5-methyl cytidine
  modified_base 10: mod_base = OTHER; note = 5-methyl cytidine
  modified_base 12: mod_base = OTHER; note = 5-methyl cytidine
  modified_base 14..16: mod_base = OTHER; note = 5-methyl cytidine
  modified_base 18..19: mod_base = OTHER; note = 5-methyl cytidine
ctgcagagtctctccctcct

SEQ ID NO: 675 - RNA, 20 nt, synthetic construct
  source 1..20: mol_type = other RNA
  modified_base 1..20: mod_base = OTHER; note = Phosphorothioate linkage
  modified_base 1..20: mod_base = OTHER; note = 2'-O-(2-methoxyethyl) ribonucleotide
  modified_base 1: mod_base = OTHER; note = 5-methyl cytidine
  modified_base 5: mod_base = OTHER; note = 5-methyl cytidine
  modified_base 7: mod_base = OTHER; note = 5-methyl cytidine
  modified_base 9: mod_base = OTHER; note = 5-methyl cytidine
  modified_base 11: mod_base = OTHER; note = 5-methyl cytidine
ctgtctctctctggtgtgtt

SEQ ID NO: 676 - RNA, 20 nt, synthetic construct
  source 1..20: mol_type = other RNA
  modified_base 1..20: mod_base = OTHER; note = Phosphorothioate linkage
  modified_base 1..20: mod_base = OTHER; note = 2'-O-(2-methoxyethyl) ribonucleotide
  modified_base 4..5: mod_base = OTHER; note = 5-methyl cytidine
  modified_base 7: mod_base = OTHER; note = 5-methyl cytidine
  modified_base 11: mod_base = OTHER; note = 5-methyl cytidine
  modified_base 13: mod_base = OTHER; note = 5-methyl cytidine
  modified_base 15: mod_base = OTHER; note = 5-methyl cytidine
  modified_base 17: mod_base = OTHER; note = 5-methyl cytidine
ggacctctgtctctctctgg

SEQ ID NO: 677 - RNA, 20 nt, synthetic construct
  source 1..20: mol_type = other RNA
  modified_base 1..20: mod_base = OTHER; note = Phosphorothioate linkage
  modified_base 1..20: mod_base = OTHER; note = 2'-O-(2-methoxyethyl) ribonucleotide
  modified_base 3: mod_base = OTHER; note = 5-methyl cytidine
  modified_base 10: mod_base = OTHER; note = 5-methyl cytidine
  modified_base 12: mod_base = OTHER; note = 5-methyl cytidine
  modified_base 14: mod_base = OTHER; note = 5-methyl cytidine
  modified_base 18: mod_base = OTHER; note = 5-methyl cytidine
  modified_base 20: mod_base = OTHER; note = 5-methyl cytidine
gtctagggtctctctgtctc

SEQ ID NO: 678 - RNA, 20 nt, synthetic construct
  source 1..20: mol_type = other RNA
  modified_base 1..20: mod_base = OTHER; note = Phosphorothioate linkage
  modified_base 1..20: mod_base = OTHER; note = 2'-O-(2-methoxyethyl) ribonucleotide
  modified_base 8: mod_base = OTHER; note = 5-methyl cytidine
  modified_base 15: mod_base = OTHER; note = 5-methyl cytidine
  modified_base 17: mod_base = OTHER; note = 5-methyl cytidine
  modified_base 19: mod_base = OTHER; note = 5-methyl cytidine
tgtgggtctagggtctctct

SEQ ID NO: 679 - RNA, 20 nt, synthetic construct
  source 1..20: mol_type = other RNA
  modified_base 1..20: mod_base = OTHER; note = Phosphorothioate linkage
  modified_base 1..20: mod_base = OTHER; note = 2'-O-(2-methoxyethyl) ribonucleotide
  modified_base 1: mod_base = OTHER; note = 5-methyl cytidine
  modified_base 5: mod_base = OTHER; note = 5-methyl cytidine
  modified_base 7: mod_base = OTHER; note = 5-methyl cytidine
  modified_base 15: mod_base = OTHER; note = 5-methyl cytidine
ctttctctgtgggtctaggg

SEQ ID NO: 680 - RNA, 20 nt, synthetic construct
  source 1..20: mol_type = other RNA
  modified_base 1..20: mod_base = OTHER; note = Phosphorothioate linkage
  modified_base 1..20: mod_base = OTHER; note = 2'-O-(2-methoxyethyl) ribonucleotide
  modified_base 8: mod_base = OTHER; note = 5-methyl cytidine
  modified_base 12: mod_base = OTHER; note = 5-methyl cytidine
  modified_base 14: mod_base = OTHER; note = 5-methyl cytidine
gaagtatctttctctgtggg

SEQ ID NO: 681 - RNA, 20 nt, synthetic construct
  source 1..20: mol_type = other RNA
  modified_base 1..20: mod_base = OTHER; note = Phosphorothioate linkage
  modified_base 1..20: mod_base = OTHER; note = 2'-O-(2-methoxyethyl) ribonucleotide
  modified_base 15: mod_base = OTHER; note = 5-methyl cytidine
  modified_base 19: mod_base = OTHER; note = 5-methyl cytidine
gggtggtgaagtatctttct

SEQ ID NO: 682 - RNA, 20 nt, synthetic construct
  source 1..20: mol_type = other RNA
  modified_base 1..20: mod_base = OTHER; note = Phosphorothioate linkage
  modified_base 1..20: mod_base = OTHER; note = 2'-O-(2-methoxyethyl) ribonucleotide
  modified_base 3..5: mod_base = OTHER; note = 5-methyl cytidine
  modified_base 11: mod_base = OTHER; note = 5-methyl cytidine
  modified_base 13: mod_base = OTHER; note = 5-methyl cytidine
  modified_base 20: mod_base = OTHER; note = 5-methyl cytidine
ggccctgtgtctcaaattac

SEQ ID NO: 683 - RNA, 20 nt, synthetic construct
  source 1..20: mol_type = other RNA
  modified_base 1..20: mod_base = OTHER; note = Phosphorothioate linkage
  modified_base 1..20: mod_base = OTHER; note = 2'-O-(2-methoxyethyl) ribonucleotide
  modified_base 9..11: mod_base = OTHER; note = 5-methyl cytidine
  modified_base 17: mod_base = OTHER; note = 5-methyl cytidine
  modified_base 19: mod_base = OTHER; note = 5-methyl cytidine
gattttggccctgtgtctca

SEQ ID NO: 684 - RNA, 20 nt, synthetic construct
  source 1..20: mol_type = other RNA
  modified_base 1..20: mod_base = OTHER; note = Phosphorothioate linkage
  modified_base 1..20: mod_base = OTHER; note = 2'-O-(2-methoxyethyl) ribonucleotide
  modified_base 1..2: mod_base = OTHER; note = 5-methyl cytidine
  modified_base 4: mod_base = OTHER; note = 5-methyl cytidine
  modified_base 15..17: mod_base = OTHER; note = 5-methyl cytidine
cctctagattttggccctgt

SEQ ID NO: 685 - RNA, 20 nt, synthetic construct
  source 1..20: mol_type = other RNA
  modified_base 1..20: mod_base = OTHER; note = Phosphorothioate linkage
  modified_base 1..20: mod_base = OTHER; note = 2'-O-(2-methoxyethyl) ribonucleotide
  modified_base 1: mod_base = OTHER; note = 5-methyl cytidine
  modified_base 17..19: mod_base = OTHER; note = 5-methyl cytidine
ctgtaggtatggagaaccct

SEQ ID NO: 686 - RNA, 20 nt, synthetic construct
  source 1..20: mol_type = other RNA
  modified_base 1..20: mod_base = OTHER; note = Phosphorothioate linkage
  modified_base 1..20: mod_base = OTHER; note = 2'-O-(2-methoxyethyl) ribonucleotide
  modified_base 2: mod_base = OTHER; note = 5-methyl cytidine
  modified_base 6: mod_base = OTHER; note = 5-methyl cytidine
  modified_base 8: mod_base = OTHER; note = 5-methyl cytidine
  modified_base 12: mod_base = OTHER; note = 5-methyl cytidine
  modified_base 18: mod_base = OTHER; note = 5-methyl cytidine
tctggctctttctgaatctg

SEQ ID NO: 687 - RNA, 20 nt, synthetic construct
  source 1..20: mol_type = other RNA
  modified_base 1..20: mod_base = OTHER; note = Phosphorothioate linkage
  modified_base 1..20: mod_base = OTHER; note = 2'-O-(2-methoxyethyl) ribonucleotide
  modified_base 1: mod_base = OTHER; note = 5-methyl cytidine
  modified_base 4: mod_base = OTHER; note = 5-methyl cytidine
  modified_base 7: mod_base = OTHER; note = 5-methyl cytidine
  modified_base 11: mod_base = OTHER; note = 5-methyl cytidine
  modified_base 13: mod_base = OTHER; note = 5-methyl cytidine
  modified_base 17: mod_base = OTHER; note = 5-methyl cytidine
ctacatctggctctttctga

SEQ ID NO: 688 - RNA, 20 nt, synthetic construct
  source 1..20: mol_type = other RNA
  modified_base 1..20: mod_base = OTHER; note = Phosphorothioate linkage
  modified_base 1..20: mod_base = OTHER; note = 2'-O-(2-methoxyethyl) ribonucleotide
  modified_base 5: mod_base = OTHER; note = 5-methyl cytidine
  modified_base 7: mod_base = OTHER; note = 5-methyl cytidine
  modified_base 11: mod_base = OTHER; note = 5-methyl cytidine
  modified_base 17: mod_base = OTHER; note = 5-methyl cytidine
gggtctctttctaggtctga

SEQ ID NO: 689 - RNA, 20 nt, synthetic construct
  source 1..20: mol_type = other RNA
  modified_base 1..20: mod_base = OTHER; note = Phosphorothioate linkage
  modified_base 1..20: mod_base = OTHER; note = 2'-O-(2-methoxyethyl) ribonucleotide
  modified_base 3: mod_base = OTHER; note = 5-methyl cytidine
  modified_base 12: mod_base = OTHER; note = 5-methyl cytidine
  modified_base 14: mod_base = OTHER; note = 5-methyl cytidine
  modified_base 18: mod_base = OTHER; note = 5-methyl cytidine
  modified_base 20: mod_base = OTHER; note = 5-methyl cytidine
gtcaggagtgtctctgtctc

SEQ ID NO: 690 - RNA, 20 nt, synthetic construct
  source 1..20: mol_type = other RNA
  modified_base 1..20: mod_base = OTHER; note = Phosphorothioate linkage
  modified_base 1..20: mod_base = OTHER; note = 2'-O-(2-methoxyethyl) ribonucleotide
  modified_base 2: mod_base = OTHER; note = 5-methyl cytidine
  modified_base 9: mod_base = OTHER; note = 5-methyl cytidine
  modified_base 11: mod_base = OTHER; note = 5-methyl cytidine
  modified_base 15: mod_base = OTHER; note = 5-methyl cytidine
  modified_base 17..20: mod_base = OTHER; note = 5-methyl cytidine
gctgaagtctctatctcccc

SEQ ID NO: 691 - RNA, 20 nt, synthetic construct
  source 1..20: mol_type = other RNA
  modified_base 1..20: mod_base = OTHER; note = Phosphorothioate linkage
  modified_base 1..20: mod_base = OTHER; note = 2'-O-(2-methoxyethyl) ribonucleotide
  modified_base 2: mod_base = OTHER; note = 5-methyl cytidine
  modified_base 4..5: mod_base = OTHER; note = 5-methyl cytidine
  modified_base 9..10: mod_base = OTHER; note = 5-methyl cytidine
  modified_base 13: mod_base = OTHER; note = 5-methyl cytidine
  modified_base 20: mod_base = OTHER; note = 5-methyl cytidine
tctccggaccagctgaagtc

SEQ ID NO: 692 - RNA, 20 nt, synthetic construct
  source 1..20: mol_type = other RNA
  modified_base 1..20: mod_base = OTHER; note = Phosphorothioate linkage
  modified_base 1..20: mod_base = OTHER; note = 2'-O-(2-methoxyethyl) ribonucleotide
  modified_base 5: mod_base = OTHER; note = 5-methyl cytidine
  modified_base 7: mod_base = OTHER; note = 5-methyl cytidine
  modified_base 16..17: mod_base = OTHER; note = 5-methyl cytidine
  modified_base 20: mod_base = OTHER; note = 5-methyl cytidine
gggtctctgagttgtccatc

SEQ ID NO: 693 - RNA, 20 nt, synthetic construct
  source 1..20: mol_type = other RNA
  modified_base 1..20: mod_base = OTHER; note = Phosphorothioate linkage
  modified_base 1..20: mod_base = OTHER; note = 2'-O-(2-methoxyethyl) ribonucleotide
  modified_base 4: mod_base = OTHER; note = 5-methyl cytidine
  modified_base 6: mod_base = OTHER; note = 5-methyl cytidine
  modified_base 8: mod_base = OTHER; note = 5-methyl cytidine
  modified_base 10: mod_base = OTHER; note = 5-methyl cytidine
  modified_base 17: mod_base = OTHER; note = 5-methyl cytidine
ggtcgcactctgaggtcttt

SEQ ID NO: 694 - RNA, 20 nt, synthetic construct
  source 1..20: mol_type = other RNA
  modified_base 1..20: mod_base = OTHER; note = Phosphorothioate linkage
  modified_base 1..20: mod_base = OTHER; note = 2'-O-(2-methoxyethyl) ribonucleotide
  modified_base 5: mod_base = OTHER; note = 5-methyl cytidine
  modified_base 12: mod_base = OTHER; note = 5-methyl cytidine
  modified_base 14: mod_base = OTHER; note = 5-methyl cytidine
  modified_base 16: mod_base = OTHER; note = 5-methyl cytidine
  modified_base 18: mod_base = OTHER; note = 5-methyl cytidine
gggtctgtggtcgcactctg

SEQ ID NO: 695 - RNA, 20 nt, synthetic construct
  source 1..20: mol_type = other RNA
  modified_base 1..20: mod_base = OTHER; note = Phosphorothioate linkage
  modified_base 1..20: mod_base = OTHER; note = 2'-O-(2-methoxyethyl) ribonucleotide
  modified_base 5: mod_base = OTHER; note = 5-methyl cytidine
  modified_base 11: mod_base = OTHER; note = 5-methyl cytidine
  modified_base 18: mod_base = OTHER; note = 5-methyl cytidine
  modified_base 20: mod_base = OTHER; note = 5-methyl cytidine
gtttcagggtctgtggtcgc

SEQ ID NO: 696 - RNA, 20 nt, synthetic construct
  source 1..20: mol_type = other RNA
  modified_base 1..20: mod_base = OTHER; note = Phosphorothioate linkage
  modified_base 1..20: mod_base = OTHER; note = 2'-O-(2-methoxyethyl) ribonucleotide
  modified_base 2: mod_base = OTHER; note = 5-methyl cytidine
  modified_base 10: mod_base = OTHER; note = 5-methyl cytidine
  modified_base 16: mod_base = OTHER; note = 5-methyl cytidine
tctatgtttcagggtctgtg

SEQ ID NO: 697 - RNA, 20 nt, synthetic construct
  source 1..20: mol_type = other RNA
  modified_base 1..20: mod_base = OTHER; note = Phosphorothioate linkage
  modified_base 1..20: mod_base = OTHER; note = 2'-O-(2-methoxyethyl) ribonucleotide
  modified_base 5: mod_base = OTHER; note = 5-methyl cytidine
ttttcagattttgatattga

SEQ ID NO: 698 - RNA, 20 nt, synthetic construct
  source 1..20: mol_type = other RNA
  modified_base 1..20: mod_base = OTHER; note = Phosphorothioate linkage
  modified_base 1..20: mod_base = OTHER; note = 2'-O-(2-methoxyethyl) ribonucleotide
  modified_base 1..2: mod_base = OTHER; note = 5-methyl cytidine
  modified_base 9: mod_base = OTHER; note = 5-methyl cytidine
  modified_base 12: mod_base = OTHER; note = 5-methyl cytidine
  modified_base 15: mod_base = OTHER; note = 5-methyl cytidine
  modified_base 17: mod_base = OTHER; note = 5-methyl cytidine
cctgaaatcatcatctcagg

SEQ ID NO: 699 - RNA, 20 nt, synthetic construct
  source 1..20: mol_type = other RNA
  modified_base 1..20: mod_base = OTHER; note = Phosphorothioate linkage
  modified_base 1..20: mod_base = OTHER; note = 2'-O-(2-methoxyethyl) ribonucleotide
  modified_base 13..14: mod_base = OTHER; note = 5-methyl cytidine
aggattgagtttccttttat

SEQ ID NO: 700 - RNA, 20 nt, synthetic construct
  source 1..20: mol_type = other RNA
  modified_base 1..20: mod_base = OTHER; note = Phosphorothioate linkage
  modified_base 1..20: mod_base = OTHER; note = 2'-O-(2-methoxyethyl) ribonucleotide
  modified_base 6: mod_base = OTHER; note = 5-methyl cytidine
  modified_base 10: mod_base = OTHER; note = 5-methyl cytidine
gagatctttcttaggattga

SEQ ID NO: 701 - RNA, 20 nt, synthetic construct
  source 1..20: mol_type = other RNA
  modified_base 1..20: mod_base = OTHER; note = Phosphorothioate linkage
  modified_base 1..20: mod_base = OTHER; note = 2'-O-(2-methoxyethyl) ribonucleotide
  modified_base 1: mod_base = OTHER; note = 5-methyl cytidine
  modified_base 3: mod_base = OTHER; note = 5-methyl cytidine
  modified_base 9: mod_base = OTHER; note = 5-methyl cytidine
  modified_base 16: mod_base = OTHER; note = 5-methyl cytidine
ctctgagacagatttcggag

SEQ ID NO: 702 - DNA, 20 bp, synthetic construct
  source 1..20: mol_type = other DNA
  modified_base 1..20: mod_base = OTHER; note = Phosphorothioate linkage
  modified_base 1..5: mod_base = OTHER; note = 2'-O-(2-methoxyethyl) ribonucleotide
  misc_feature 1..5: note = RNA
  misc_feature 6..7: note = DNA
  misc_feature 8: note = RNA
  modified_base 8: mod_base = OTHER; note = 2'-O-(2-methoxyethyl) ribonucleotide
  misc_feature 9..10: note = DNA
  misc_feature 11: note = RNA
  modified_base 11: mod_base = OTHER; note = 2'-O-(2-methoxyethyl) ribonucleotide
  misc_feature 12..13: note = DNA
  misc_feature 14: note = RNA
  modified_base 14: mod_base = OTHER; note = 2'-O-(2-methoxyethyl) ribonucleotide
  misc_feature 15: note = DNA
  misc_feature 16..20: note = RNA
  modified_base 16..20: mod_base = OTHER; note = 2'-O-(2-methoxyethyl) ribonucleotide
  modified_base 2: mod_base = OTHER; note = 5-methyl cytidine
  modified_base 8..9: mod_base = OTHER; note = 5-methyl cytidine
  modified_base 13..15: mod_base = OTHER; note = 5-methyl cytidine
gcaagtgccaggcccacatg

SEQ ID NO: 703 - DNA, 20 bp, synthetic construct
  source 1..20: mol_type = other DNA
  modified_base 1..20: mod_base = OTHER; note = Phosphorothioate linkage
  modified_base 1..2: mod_base = OTHER; note = 2'-O-(2-methoxyethyl) ribonucleotide
  modified_base 3: mod_base = OTHER; note = Locked nucleic acid
  modified_base 4..5: mod_base = OTHER; note = 2'-O-(2-methoxyethyl) ribonucleotide
  misc_feature 1..5: note = RNA
  misc_feature 6..15: note = DNA
  misc_feature 16..20: note = RNA
  modified_base 16..17: mod_base = OTHER; note = 2'-O-(2-methoxyethyl) ribonucleotide
  modified_base 18: mod_base = OTHER; note = Locked nucleic acid
  modified_base 19..20: mod_base = OTHER; note = 2'-O-(2-methoxyethyl) ribonucleotide
  modified_base 2: mod_base = OTHER; note = 5-methyl cytidine
  modified_base 8..9: mod_base = OTHER; note = 5-methyl cytidine
  modified_base 13..15: mod_base = OTHER; note = 5-methyl cytidine
  modified_base 17: mod_base = OTHER; note = 5-methyl cytidine
gcaagtgccaggcccacatg

SEQ ID NO: 704 - DNA, 20 bp, synthetic construct
  source 1..20: mol_type = other DNA
  modified_base 1..20: mod_base = OTHER; note = Phosphorothioate linkage
  modified_base 1..2: mod_base = OTHER; note = 2'-O-(2-methoxyethyl) ribonucleotide
  modified_base 3: mod_base = OTHER; note = Locked nucleic acid
  modified_base 4: mod_base = OTHER; note = 2'-O-(2-methoxyethyl) ribonucleotide
  modified_base 5: mod_base = OTHER; note = Locked nucleic acid
  misc_feature 1..5: note = RNA
  misc_feature 6..15: note = DNA
  misc_feature 16..20: note = RNA
  modified_base 16..20: mod_base = OTHER; note = 2'-O-(2-methoxyethyl) ribonucleotide
  modified_base 2: mod_base = OTHER; note = 5-methyl cytidine
  modified_base 8..9: mod_base = OTHER; note = 5-methyl cytidine
  modified_base 13..15: mod_base = OTHER; note = 5-methyl cytidine
  modified_base 17: mod_base = OTHER; note = 5-methyl cytidine
gcaagtgccaggcccacatg

SEQ ID NO: 705 - DNA, 20 bp, synthetic construct
  source 1..20: mol_type = other DNA
  modified_base 1..20: mod_base = OTHER; note = Phosphorothioate linkage
  modified_base 1: mod_base = OTHER; note = 2'-O-(2-methoxyethyl) ribonucleotide
  modified_base 2: mod_base = OTHER; note = Locked nucleic acid
  modified_base 3: mod_base = OTHER; note = 2'-O-(2-methoxyethyl) ribonucleotide
  modified_base 4: mod_base = OTHER; note = Locked nucleic acid
  modified_base 5: mod_base = OTHER; note = 2'-O-(2-methoxyethyl) ribonucleotide
  misc_feature 1..5: note = RNA
  misc_feature 6..15: note = DNA
  misc_feature 16..20: note = RNA
  modified_base 16: mod_base = OTHER; note = 2'-O-(2-methoxyethyl) ribonucleotide
  modified_base 17: mod_base = OTHER; note = Locked nucleic acid
  modified_base 18: mod_base = OTHER; note = 2'-O-(2-methoxyethyl) ribonucleotide
  modified_base 19: mod_base = OTHER; note = Locked nucleic acid
  modified_base 20: mod_base = OTHER; note = 2'-O-(2-methoxyethyl) ribonucleotide
  modified_base 2: mod_base = OTHER; note = 5-methyl cytidine
  modified_base 8..9: mod_base = OTHER; note = 5-methyl cytidine
  modified_base 13..15: mod_base = OTHER; note = 5-methyl cytidine
  modified_base 17: mod_base = OTHER; note = 5-methyl cytidine
gcaagtgccaggcccacatg

SEQ ID NO: 706 - DNA, 20 bp, synthetic construct
  source 1..20: mol_type = other DNA
  modified_base 1..20: mod_base = OTHER; note = Phosphorothioate linkage
  modified_base 1: mod_base = OTHER; note = 2'-O-(2-methoxyethyl) ribonucleotide
  modified_base 2: mod_base = OTHER; note = Locked nucleic acid
  modified_base 3: mod_base = OTHER; note = 2'-O-(2-methoxyethyl) ribonucleotide
  modified_base 4: mod_base = OTHER; note = Locked nucleic acid
  modified_base 5: mod_base = OTHER; note = 2'-O-(2-methoxyethyl) ribonucleotide
  misc_feature 1..5: note = RNA
  misc_feature 6..7: note = DNA
  misc_feature 8: note = RNA
  modified_base 8: mod_base = OTHER; note = 2'-O-(2-methoxyethyl) ribonucleotide
  misc_feature 9..10: note = DNA
  misc_feature 11: note = RNA
  modified_base 11: mod_base = OTHER; note = 2'-O-(2-methoxyethyl) ribonucleotide
  misc_feature 12..13: note = DNA
  misc_feature 14: note = RNA
  modified_base 14: mod_base = OTHER; note = 2'-O-(2-methoxyethyl) ribonucleotide
  misc_feature 15: note = DNA
  misc_feature 16..20: note = RNA
  modified_base 16: mod_base = OTHER; note = 2'-O-(2-methoxyethyl) ribonucleotide
  modified_base 17: mod_base = OTHER; note = Locked nucleic acid
  modified_base 18: mod_base = OTHER; note = 2'-O-(2-methoxyethyl) ribonucleotide
  modified_base 19: mod_base = OTHER; note = Locked nucleic acid
  modified_base 20: mod_base = OTHER; note = 2'-O-(2-methoxyethyl) ribonucleotide
  modified_base 2: mod_base = OTHER; note = 5-methyl cytidine
  modified_base 8..9: mod_base = OTHER; note = 5-methyl cytidine
  modified_base 13..15: mod_base = OTHER; note = 5-methyl cytidine
  modified_base 17: mod_base = OTHER; note = 5-methyl cytidine
gcaagtgccaggcccacatg

SEQ ID NO: 707 - DNA, 20 bp, synthetic construct
  source 1..20: mol_type = other DNA
  modified_base 1..20: mod_base = OTHER; note = Phosphorothioate linkage
  modified_base 1: mod_base = OTHER; note = Locked nucleic acid
  modified_base 2: mod_base = OTHER; note = 2'-O-(2-methoxyethyl) ribonucleotide
  modified_base 3: mod_base = OTHER; note = Locked nucleic acid
  modified_base 4..5: mod_base = OTHER; note = 2'-O-(2-methoxyethyl) ribonucleotide
  misc_feature 1..5: note = RNA
  misc_feature 6..15: note = DNA
  misc_feature 16..20: note = RNA
  modified_base 16..17: mod_base = OTHER; note = 2'-O-(2-methoxyethyl) ribonucleotide
  modified_base 18: mod_base = OTHER; note = Locked nucleic acid
  modified_base 19: mod_base = OTHER; note = 2'-O-(2-methoxyethyl) ribonucleotide
  modified_base 20: mod_base = OTHER; note = Locked nucleic acid
  modified_base 2: mod_base = OTHER; note = 5-methyl cytidine
  modified_base 8..9: mod_base = OTHER; note = 5-methyl cytidine
  modified_base 13..15: mod_base = OTHER; note = 5-methyl cytidine
  modified_base 17: mod_base = OTHER; note = 5-methyl cytidine
gcaagtgccaggcccacatg

SEQ ID NO: 708 - DNA, 20 bp, synthetic construct
  source 1..20: mol_type = other DNA
  modified_base 1..3: mod_base = OTHER; note = Phosphorothioate linkage
  modified_base 5..16: mod_base = OTHER; note = Phosphorothioate linkage
  modified_base 18..20: mod_base = OTHER; note = Phosphorothioate linkage
  modified_base 1..5: mod_base = OTHER; note = 2'-O-(2-methoxyethyl) ribonucleotide
  misc_feature 1..5: note = RNA
  misc_feature 6..15: note = DNA
  misc_feature 16..20: note = RNA
  modified_base 16..20: mod_base = OTHER; note = 2'-O-(2-methoxyethyl) ribonucleotide
  modified_base 2: mod_base = OTHER; note = 5-methyl cytidine
  modified_base 8..9: mod_base = OTHER; note = 5-methyl cytidine
  modified_base 13..15: mod_base = OTHER; note = 5-methyl cytidine
  modified_base 17: mod_base = OTHER; note = 5-methyl cytidine
gcaagtgccaggcccacatg

SEQ ID NO: 709 - DNA, 20 bp, synthetic construct
  source 1..20: mol_type = other DNA
  modified_base 1..3: mod_base = OTHER; note = Phosphorothioate linkage
  modified_base 5..16: mod_base = OTHER; note = Phosphorothioate linkage
  modified_base 18..20: mod_base = OTHER; note = Phosphorothioate linkage
  modified_base 1..5: mod_base = OTHER; note = 2'-O-(2-methoxyethyl) ribonucleotide
  misc_feature 1..5: note = RNA
  misc_feature 6..15: note = DNA
  misc_feature 16..20: note = RNA
  modified_base 16..20: mod_base = OTHER; note = 2'-O-(2-methoxyethyl) ribonucleotide
  modified_base 2: mod_base = OTHER; note = 5-methyl cytidine
  modified_base 8..9: mod_base = OTHER; note = 5-methyl cytidine
  modified_base 13..15: mod_base = OTHER; note = 5-methyl cytidine
  modified_base 17: mod_base = OTHER; note = 5-methyl cytidine
gcaagtgccaggcccacatg

SEQ ID NO: 710 - DNA, 22 bp, synthetic construct
  source 1..22: mol_type = other DNA
  modified_base 1..22: mod_base = OTHER; note = Phosphorothioate linkage
  modified_base 1..6: mod_base = OTHER; note = 2'-O-(2-methoxyethyl) ribonucleotide
  misc_feature 1..6: note = RNA
  misc_feature 7..16: note = DNA
  misc_feature 17..22: note = RNA
  modified_base 17..22: mod_base = OTHER; note = 2'-O-(2-methoxyethyl) ribonucleotide
  modified_base 3: mod_base = OTHER; note = 5-methyl cytidine
  modified_base 9..10: mod_base = OTHER; note = 5-methyl cytidine
  modified_base 14..16: mod_base = OTHER; note = 5-methyl cytidine
  modified_base 18: mod_base = OTHER; note = 5-methyl cytidine
ggcaagtgccaggcccacatgg

SEQ ID NO: 711 - DNA, 20 bp, synthetic construct
  source 1..20: mol_type = other DNA
  modified_base 1..20: mod_base = OTHER; note = Phosphorothioate linkage
  modified_base 1..5: mod_base = OTHER; note = 2'-O-(2-methoxyethyl) ribonucleotide
  misc_feature 1..5: note = RNA
  misc_feature 6..7: note = DNA
  misc_feature 8: note = RNA
  modified_base 8: mod_base = OTHER; note = 2'-O-(2-methoxyethyl) ribonucleotide
  modified_base 9: mod_base = OTHER; note = 5-methyl cytidine
  misc_feature 9..10: note = DNA
  misc_feature 11: note = RNA
  modified_base 11: mod_base = OTHER; note = 2'-O-(2-methoxyethyl) ribonucleotide
  modified_base 11: mod_base = OTHER; note = 5-methyl cytidine
  misc_feature 12..13: note = DNA
  misc_feature 14: note = RNA
  modified_base 14: mod_base = OTHER; note = 2'-O-(2-methoxyethyl) ribonucleotide
  misc_feature 15: note = DNA
  misc_feature 16..20: note = RNA
  modified_base 16..20: mod_base = OTHER; note = 2'-O-(2-methoxyethyl) ribonucleotide
tgggaagacacaaagtgatg

SEQ ID NO: 712 - DNA, 20 bp, synthetic construct
  source 1..20: mol_type = other DNA
  modified_base 1..20: mod_base = OTHER; note = Phosphorothioate linkage
  modified_base 1..2: mod_base = OTHER; note = 2'-O-(2-methoxyethyl) ribonucleotide
  modified_base 3: mod_base = OTHER; note = Locked nucleic acid
  modified_base 4..5: mod_base = OTHER; note = 2'-O-(2-methoxyethyl) ribonucleotide
  misc_feature 1..5: note = RNA
  misc_feature 6..15: note = DNA
  misc_feature 16..20: note = RNA
  modified_base 16..17: mod_base = OTHER; note = 2'-O-(2-methoxyethyl) ribonucleotide
  modified_base 18: mod_base = OTHER; note = Locked nucleic acid
  modified_base 19..20: mod_base = OTHER; note = 2'-O-(2-methoxyethyl) ribonucleotide
  modified_base 9: mod_base = OTHER; note = 5-methyl cytidine
  modified_base 11: mod_base = OTHER; note = 5-methyl cytidine
tgggaagacacaaagtgatg

SEQ ID NO: 713 - DNA, 20 bp, synthetic construct
  source 1..20: mol_type = other DNA
  modified_base 1..20: mod_base = OTHER; note = Phosphorothioate linkage
  modified_base 1..2: mod_base = OTHER; note = 2'-O-(2-methoxyethyl) ribonucleotide
  modified_base 3: mod_base = OTHER; note = Locked nucleic acid
  modified_base 4: mod_base = OTHER; note = 2'-O-(2-methoxyethyl) ribonucleotide
  modified_base 5: mod_base = OTHER; note = Locked nucleic acid
  misc_feature 1..5: note = RNA
  misc_feature 6..15: note = DNA
  misc_feature 16..20: note = RNA
  modified_base 16..20: mod_base = OTHER; note = 2'-O-(2-methoxyethyl) ribonucleotide
  modified_base 9: mod_base = OTHER; note = 5-methyl cytidine
  modified_base 11: mod_base = OTHER; note = 5-methyl cytidine
tgggaagacacaaagtgatg

SEQ ID NO: 714 - DNA, 20 bp, synthetic construct
  source 1..20: mol_type = other DNA
  modified_base 1..20: mod_base = OTHER; note = Phosphorothioate linkage
  modified_base 1: mod_base = OTHER; note = 2'-O-(2-methoxyethyl) ribonucleotide
  modified_base 2: mod_base = OTHER; note = Locked nucleic acid
  modified_base 3: mod_base = OTHER; note = 2'-O-(2-methoxyethyl) ribonucleotide
  modified_base 4: mod_base = OTHER; note = Locked nucleic acid
  modified_base 5: mod_base = OTHER; note = 2'-O-(2-methoxyethyl) ribonucleotide
  misc_feature 1..5: note = RNA
  misc_feature 6..15: note = DNA
  misc_feature 16..20: note = RNA
  modified_base 16: mod_base = OTHER; note = 2'-O-(2-methoxyethyl) ribonucleotide
  modified_base 17: mod_base = OTHER; note = Locked nucleic acid
  modified_base 18: mod_base = OTHER; note = 2'-O-(2-methoxyethyl) ribonucleotide
  modified_base 19: mod_base = OTHER; note = Locked nucleic acid
  modified_base 20: mod_base = OTHER; note = 2'-O-(2-methoxyethyl) ribonucleotide
  modified_base 9: mod_base = OTHER; note = 5-methyl cytidine
  modified_base 11: mod_base = OTHER; note = 5-methyl cytidine
tgggaagacacaaagtgatg

SEQ ID NO: 715 - DNA, 20 bp, synthetic construct
  source 1..20: mol_type = other DNA
  modified_base 1..20: mod_base = OTHER; note = Phosphorothioate linkage
  modified_base 1: mod_base = OTHER; note = 2'-O-(2-methoxyethyl) ribonucleotide
  modified_base 2: mod_base = OTHER; note = Locked nucleic acid
  modified_base 3: mod_base = OTHER; note = 2'-O-(2-methoxyethyl) ribonucleotide
  modified_base 4: mod_base = OTHER; note = Locked nucleic acid
  modified_base 5: mod_base = OTHER; note = 2'-O-(2-methoxyethyl) ribonucleotide
  misc_feature 1..5: note = RNA
  misc_feature 6..7: note = DNA
  misc_feature 8: note = RNA
  modified_base 8: mod_base = OTHER; note = 2'-O-(2-methoxyethyl) ribonucleotide
  misc_feature 9..10: note = DNA
  misc_feature 11: note = RNA
  modified_base 11: mod_base = OTHER; note = 2'-O-(2-methoxyethyl) ribonucleotide
  misc_feature 12..13: note = DNA
  misc_feature 14: note = RNA
  modified_base 14: mod_base = OTHER; note = 2'-O-(2-methoxyethyl) ribonucleotide
  misc_feature 15: note = DNA
  misc_feature 16..20: note = RNA
  modified_base 16: mod_base = OTHER; note = 2'-O-(2-methoxyethyl) ribonucleotide
  modified_base 17: mod_base = OTHER; note = Locked nucleic acid
  modified_base 18: mod_base = OTHER; note = 2'-O-(2-methoxyethyl) ribonucleotide
  modified_base 19: mod_base = OTHER; note = Locked nucleic acid
  modified_base 20: mod_base = OTHER; note = 2'-O-(2-methoxyethyl) ribonucleotide
  modified_base 9: mod_base = OTHER; note = 5-methyl cytidine
  modified_base 11: mod_base = OTHER; note = 5-methyl cytidine
tgggaagacacaaagtgatg

SEQ ID NO: 716 - DNA, 20 bp, synthetic construct
  source 1..20: mol_type = other DNA
  modified_base 1..20: mod_base = OTHER; note = Phosphorothioate linkage
  modified_base 1: mod_base = OTHER; note = Locked nucleic acid
  modified_base 2: mod_base = OTHER; note = 2'-O-(2-methoxyethyl) ribonucleotide
  modified_base 3: mod_base = OTHER; note = Locked nucleic acid
  modified_base 4..5: mod_base = OTHER; note = 2'-O-(2-methoxyethyl) ribonucleotide
  misc_feature 1..5: note = RNA
  misc_feature 6..15: note = DNA
  misc_feature 16..20: note = RNA
  modified_base 16..17: mod_base = OTHER; note = 2'-O-(2-methoxyethyl) ribonucleotide
  modified_base 18: mod_base = OTHER; note = Locked nucleic acid
  modified_base 19: mod_base = OTHER; note = 2'-O-(2-methoxyethyl) ribonucleotide
  modified_base 20: mod_base = OTHER; note = Locked nucleic acid
  modified_base 9: mod_base = OTHER; note = 5-methyl cytidine
  modified_base 11: mod_base = OTHER; note = 5-methyl cytidine
tgggaagacacaaagtgatg

SEQ ID NO: 717 - DNA, 20 bp, synthetic construct
  source 1..20: mol_type = other DNA
  modified_base 1..3: mod_base = OTHER; note = Phosphorothioate linkage
  modified_base 5..16: mod_base = OTHER; note = Phosphorothioate linkage
  modified_base 18..20: mod_base = OTHER; note = Phosphorothioate linkage
  modified_base 1..5: mod_base = OTHER; note = 2'-O-(2-methoxyethyl) ribonucleotide
  misc_feature 1..5: note = RNA
  misc_feature 6..15: note = DNA
  misc_feature 16..20: note = RNA
  modified_base 16..20: mod_base = OTHER; note = 2'-O-(2-methoxyethyl) ribonucleotide
  modified_base 9: mod_base = OTHER; note = 5-methyl cytidine
  modified_base 11: mod_base = OTHER; note = 5-methyl cytidine
tgggaagacacaaagtgatg

SEQ ID NO: 718 - DNA, 20 bp, synthetic construct
  source 1..20: mol_type = other DNA
  modified_base 1..2: mod_base = OTHER; note = Phosphorothioate linkage
  modified_base 5..16: mod_base = OTHER; note = Phosphorothioate linkage
  modified_base 19..20: mod_base = OTHER; note = Phosphorothioate linkage
  modified_base 1..5: mod_base = OTHER; note = 2'-O-(2-methoxyethyl) ribonucleotide
  misc_feature 1..5: note = RNA
  misc_feature 6..15: note = DNA
  misc_feature 16..20: note = RNA
  modified_base 16..20: mod_base = OTHER; note = 2'-O-(2-methoxyethyl) ribonucleotide
  modified_base 9: mod_base = OTHER; note = 5-methyl cytidine
  modified_base 11: mod_base = OTHER; note = 5-methyl cytidine
tgggaagacacaaagtgatg

SEQ ID NO: 719 - DNA, 22 bp, synthetic construct
  source 1..22: mol_type = other DNA
  modified_base 1..20: mod_base = OTHER; note = Phosphorothioate linkage
  modified_base 1..6: mod_base = OTHER; note = 2'-O-(2-methoxyethyl) ribonucleotide
  misc_feature 1..6: note = RNA
  misc_feature 7..16: note = DNA
  misc_feature 17..22: note = RNA
  modified_base 17..22: mod_base = OTHER; note = 2'-O-(2-methoxyethyl) ribonucleotide
  modified_base 10: mod_base = OTHER; note = 5-methyl cytidine
  modified_base 11: mod_base = OTHER; note = 5-methyl cytidine
gtgggaagacacaaagtgatgt

SEQ ID NO: 720 - DNA, 20 bp, synthetic construct
  source 1..20: mol_type = other DNA
  modified_base 1..20: mod_base = OTHER; note = Phosphorothioate linkage
  modified_base 1..5: mod_base = OTHER; note = 2'-O-(2-methoxyethyl) ribonucleotide
  misc_feature 1..5: note = RNA
  misc_feature 6..7: note = DNA
  misc_feature 8: note = RNA
  modified_base 8: mod_base = OTHER; note = 2'-O-(2-methoxyethyl) ribonucleotide
  misc_feature 9..10: note = DNA
  misc_feature 11: note = RNA
  modified_base 11: mod_base = OTHER; note = 2'-O-(2-methoxyethyl) ribonucleotide
  misc_feature 12..13: note = DNA
  misc_feature 14: note = RNA
  modified_base 14: mod_base = OTHER; note = 2'-O-(2-methoxyethyl) ribonucleotide
  misc_feature 15: note = DNA
  misc_feature 16..20: note = RNA
  modified_base 16..20: mod_base = OTHER; note = 2'-O-(2-methoxyethyl) ribonucleotide
  modified_base 2: mod_base = OTHER; note = 5-methyl cytidine
  modified_base 4..6: mod_base = OTHER; note = 5-methyl cytidine
  modified_base 10: mod_base = OTHER; note = 5-methyl cytidine
  modified_base 17: mod_base = OTHER; note = 5-methyl cytidine
gctcccgtgcagaaaacagg

SEQ ID NO: 721 - DNA, 20 bp, synthetic construct
  source 1..20: mol_type = other DNA
  modified_base 1..20: mod_base = OTHER; note = Phosphorothioate linkage
  modified_base 1..2: mod_base = OTHER; note = 2'-O-(2-methoxyethyl) ribonucleotide
  modified_base 3: mod_base = OTHER; note = Locked nucleic acid
  modified_base 4..5: mod_base = OTHER; note = 2'-O-(2-methoxyethyl) ribonucleotide
  misc_feature 1..5: note = RNA
  misc_feature 6..15: note = DNA
  misc_feature 16..20: note = RNA
  modified_base 16..17: mod_base = OTHER; note = 2'-O-(2-methoxyethyl) ribonucleotide
  modified_base 18: mod_base = OTHER; note = Locked nucleic acid
  modified_base 19..20: mod_base = OTHER; note = 2'-O-(2-methoxyethyl) ribonucleotide
  modified_base 2: mod_base = OTHER; note = 5-methyl cytidine
  modified_base 4..6: mod_base = OTHER; note = 5-methyl cytidine
  modified_base 10: mod_base = OTHER; note = 5-methyl cytidine
  modified_base 17: mod_base = OTHER; note = 5-methyl cytidine
gctcccgtgcagaaaacagg

SEQ ID NO: 722 - DNA, 20 bp, synthetic construct
  source 1..20: mol_type = other DNA
  modified_base 1..20: mod_base = OTHER; note = Phosphorothioate linkage
  modified_base 1..2: mod_base = OTHER; note = 2'-O-(2-methoxyethyl) ribonucleotide
  modified_base 3: mod_base = OTHER; note = Locked nucleic acid
  modified_base 4: mod_base = OTHER; note = 2'-O-(2-methoxyethyl) ribonucleotide
  modified_base 5: mod_base = OTHER; note = Locked nucleic acid
  misc_feature 1..5: note = RNA
  misc_feature 6..15: note = DNA
  misc_feature 16..20: note = RNA
  modified_base 16..20: mod_base = OTHER; note = 2'-O-(2-methoxyethyl) ribonucleotide
  modified_base 2: mod_base = OTHER; note = 5-methyl cytidine
  modified_base 4..6: mod_base = OTHER; note = 5-methyl cytidine
  modified_base 10: mod_base = OTHER; note = 5-methyl cytidine
  modified_base 17: mod_base = OTHER; note = 5-methyl cytidine
gctcccgtgcagaaaacagg

SEQ ID NO: 723 - DNA, 20 bp, synthetic construct
  source 1..20: mol_type = other DNA
  modified_base 1..20: mod_base = OTHER; note = Phosphorothioate linkage
  modified_base 1: mod_base = OTHER; note = 2'-O-(2-methoxyethyl) ribonucleotide
  modified_base 2: mod_base = OTHER; note = Locked nucleic acid
  modified_base 3: mod_base = OTHER; note = 2'-O-(2-methoxyethyl) ribonucleotide
  modified_base 4: mod_base = OTHER; note = Locked nucleic acid
  modified_base 5: mod_base = OTHER; note = 2'-O-(2-methoxyethyl) ribonucleotide
  misc_feature 1..5: note = RNA
  misc_feature 6..15: note = DNA
  misc_feature 16..20: note = RNA
  modified_base 16: mod_base = OTHER; note = 2'-O-(2-methoxyethyl) ribonucleotide
  modified_base 17: mod_base = OTHER; note = Locked nucleic acid
  modified_base 18: mod_base = OTHER; note = 2'-O-(2-methoxyethyl) ribonucleotide
  modified_base 19: mod_base = OTHER; note = Locked nucleic acid
  modified_base 20: mod_base = OTHER; note = 2'-O-(2-methoxyethyl) ribonucleotide
  modified_base 2: mod_base = OTHER; note = 5-methyl cytidine
  modified_base 4..6: mod_base = OTHER; note = 5-methyl cytidine
  modified_base 10: mod_base = OTHER; note = 5-methyl cytidine
  modified_base 17: mod_base = OTHER; note = 5-methyl cytidine
gctcccgtgcagaaaacagg

SEQ ID NO: 724 - DNA, 20 bp, synthetic construct
  source 1..20: mol_type = other DNA
  modified_base 1..20: mod_base = OTHER; note = Phosphorothioate linkage
  modified_base 1: mod_base = OTHER; note = 2'-O-(2-methoxyethyl) ribonucleotide
  modified_base 2: mod_base = OTHER; note = Locked nucleic acid
  modified_base 3: mod_base = OTHER; note = 2'-O-(2-methoxyethyl) ribonucleotide
  modified_base 4: mod_base = OTHER; note = Locked nucleic acid
  modified_base 5: mod_base = OTHER; note = 2'-O-(2-methoxyethyl) ribonucleotide
  misc_feature 1..5: note = RNA
  misc_feature 6..7: note = DNA
  misc_feature 8: note = RNA
  modified_base 8: mod_base = OTHER; note = 2'-O-(2-methoxyethyl) ribonucleotide
  misc_feature 9..10: note = DNA
  misc_feature 11: note = RNA
  modified_base 11: mod_base = OTHER; note = 2'-O-(2-methoxyethyl) ribonucleotide
  misc_feature 12..13: note = DNA
  misc_feature 14: note = RNA
  modified_base 14: mod_base = OTHER; note = 2'-O-(2-methoxyethyl) ribonucleotide
  misc_feature 15: note = DNA
  misc_feature 16..20: note = RNA
  modified_base 16: mod_base = OTHER; note = 2'-O-(2-methoxyethyl) ribonucleotide
  modified_base 17: mod_base = OTHER; note = Locked nucleic acid
  modified_base 18: mod_base = OTHER; note = 2'-O-(2-methoxyethyl) ribonucleotide
  modified_base 19: mod_base = OTHER; note = Locked nucleic acid
  modified_base 20: mod_base = OTHER; note = 2'-O-(2-methoxyethyl) ribonucleotide
  modified_base 2: mod_base = OTHER; note = 5-methyl cytidine
  modified_base 4..6: mod_base = OTHER; note = 5-methyl cytidine
  modified_base 10: mod_base = OTHER; note = 5-methyl cytidine
  modified_base 17: mod_base = OTHER; note = 5-methyl cytidine
gctcccgtgcagaaaacagg

SEQ ID NO: 725 - DNA, 20 bp, synthetic construct
  source 1..20: mol_type = other DNA
  modified_base 1..20: mod_base = OTHER; note = Phosphorothioate linkage
  modified_base 1: mod_base = OTHER; note = Locked nucleic acid
  modified_base 2: mod_base = OTHER; note = 2'-O-(2-methoxyethyl) ribonucleotide
  modified_base 3: mod_base = OTHER; note = Locked nucleic acid
  modified_base 4..5: mod_base = OTHER; note = 2'-O-(2-methoxyethyl) ribonucleotide
  misc_feature 1..5: note = RNA
  misc_feature 6..15: note = DNA
  misc_feature 16..20: note = RNA
  modified_base 16..17: mod_base = OTHER; note = 2'-O-(2-methoxyethyl) ribonucleotide
  modified_base 18: mod_base = OTHER; note = Locked nucleic acid
  modified_base 19: mod_base = OTHER; note = 2'-O-(2-methoxyethyl) ribonucleotide
  modified_base 20: mod_base = OTHER; note = Locked nucleic acid
  modified_base 2: mod_base = OTHER; note = 5-methyl cytidine
  modified_base 4..6: mod_base = OTHER; note = 5-methyl cytidine
  modified_base 10: mod_base = OTHER; note = 5-methyl cytidine
  modified_base 17: mod_base = OTHER; note = 5-methyl cytidine
gctcccgtgcagaaaacagg

SEQ ID NO: 726 - DNA, 20 bp, synthetic construct
  source 1..20: mol_type = other DNA
  modified_base 1..3: mod_base = OTHER; note = Phosphorothioate linkage
  modified_base 5..16: mod_base = OTHER; note = Phosphorothioate linkage
  modified_base 18..20: mod_base = OTHER; note = Phosphorothioate linkage
  modified_base 1..5: mod_base = OTHER; note = 2'-O-(2-methoxyethyl) ribonucleotide
  misc_feature 1..5: note = RNA
  misc_feature 6..15: note = DNA
  misc_feature 16..20: note = RNA
  modified_base 16..20: mod_base = OTHER; note = 2'-O-(2-methoxyethyl) ribonucleotide
  modified_base 2: mod_base = OTHER; note = 5-methyl cytidine
  modified_base 4..6: mod_base = OTHER; note = 5-methyl cytidine
  modified_base 10: mod_base = OTHER; note = 5-methyl cytidine
  modified_base 17: mod_base = OTHER; note = 5-methyl cytidine
gctcccgtgcagaaaacagg

SEQ ID NO: 727 - DNA, 20 bp, synthetic construct
  source 1..20: mol_type = other DNA
  modified_base 1..2: mod_base = OTHER; note = Phosphorothioate linkage
  modified_base 5..16: mod_base = OTHER; note = Phosphorothioate linkage
  modified_base 19..20: mod_base = OTHER; note = Phosphorothioate linkage
  modified_base 1..5: mod_base = OTHER; note = 2'-O-(2-methoxyethyl) ribonucleotide
  misc_feature 1..5: note = RNA
  misc_feature 6..15: note = DNA
  misc_feature 16..20: note = RNA
  modified_base 16..20: mod_base = OTHER; note = 2'-O-(2-methoxyethyl) ribonucleotide
  modified_base 2: mod_base = OTHER; note = 5-methyl cytidine
  modified_base 4..6: mod_base = OTHER; note = 5-methyl cytidine
  modified_base 10: mod_base = OTHER; note = 5-methyl cytidine
  modified_base 17: mod_base = OTHER; note = 5-methyl cytidine
gctcccgtgcagaaaacagg

SEQ ID NO: 728 - DNA, 22 bp, synthetic construct
  source 1..22: mol_type = other DNA
  modified_base 1..22: mod_base = OTHER; note = Phosphorothioate linkage
  modified_base 1..6: mod_base = OTHER; note = 2'-O-(2-methoxyethyl) ribonucleotide
  misc_feature 1..6: note = RNA
  misc_feature 7..16: note = DNA
  misc_feature 17..22: note = RNA
  modified_base 17..22: mod_base = OTHER; note = 2'-O-(2-methoxyethyl) ribonucleotide
  modified_base 3: mod_base = OTHER; note = 5-methyl cytidine
  modified_base 5..7: mod_base = OTHER; note = 5-methyl cytidine
  modified_base 11: mod_base = OTHER; note = 5-methyl cytidine
  modified_base 18: mod_base = OTHER; note = 5-methyl cytidine
tgctcccgtgcagaaaacagga

SEQ ID NO: 729 - DNA, 20 bp, synthetic construct
  source 1..20: mol_type = other DNA
  modified_base 1..20: mod_base = OTHER; note = Phosphorothioate linkage
  modified_base 1..5: mod_base = OTHER; note = 2'-O-(2-methoxyethyl) ribonucleotide
  misc_feature 1..5: note = RNA
  misc_feature 6..15: note = DNA
  misc_feature 16..20: note = RNA
  modified_base 16..20: mod_base = OTHER; note = 2'-O-(2-methoxyethyl) ribonucleotide
  modified_base 1..2: mod_base = OTHER; note = 5-methyl cytidine
  modified_base 6..8: mod_base = OTHER; note = 5-methyl cytidine
ccaggcccacatggtaagta

SEQ ID NO: 730 - DNA, 20 bp, synthetic construct
  source 1..20: mol_type = other DNA
  modified_base 1..20: mod_base = OTHER; note = Phosphorothioate linkage
  modified_base 1..5: mod_base = OTHER; note = 2'-O-(2-methoxyethyl) ribonucleotide
  misc_feature 1..5: note = RNA
  misc_feature 6..15: note = DNA
  misc_feature 16..20: note = RNA
  modified_base 16..20: mod_base = OTHER; note = 2'-O-(2-methoxyethyl) ribonucleotide
  modified_base 1: mod_base = OTHER; note = 5-methyl cytidine
  modified_base 7..8: mod_base = OTHER; note = 5-methyl cytidine
  modified_base 12..14: mod_base = OTHER; note = 5-methyl cytidine
  modified_base 16: mod_base = OTHER; note = 5-methyl cytidine
caagtgccaggcccacatgg

SEQ ID NO: 731 - DNA, 20 bp, synthetic construct
  source 1..20: mol_type = other DNA
  modified_base 1..20: mod_base = OTHER; note = Phosphorothioate linkage
  modified_base 1..5: mod_base = OTHER; note = 2'-O-(2-methoxyethyl) ribonucleotide
  misc_feature 1..5: note = RNA
  misc_feature 6..15: note = DNA
  misc_feature 16..20: note = RNA
  modified_base 16..20: mod_base = OTHER; note = 2'-O-(2-methoxyethyl) ribonucleotide
  modified_base 8: mod_base = OTHER; note = 5-methyl cytidine
  modified_base 10: mod_base = OTHER; note = 5-methyl cytidine
gggaagacacaaagtgatgt

SEQ ID NO: 732 - DNA, 20 bp, synthetic construct
  source 1..20: mol_type = other DNA
  modified_base 1..20: mod_base = OTHER; note = Phosphorothioate linkage
  modified_base 1..5: mod_base = OTHER; note = 2'-O-(2-methoxyethyl) ribonucleotide
  misc_feature 1..5: note = RNA
  misc_feature 6..15: note = DNA
  misc_feature 16..20: note = RNA
  modified_base 16..20: mod_base = OTHER; note = 2'-O-(2-methoxyethyl) ribonucleotide
  modified_base 1: mod_base = OTHER; note = 5-methyl cytidine
  modified_base 12: mod_base = OTHER; note = 5-methyl cytidine
  modified_base 14: mod_base = OTHER; note = 5-methyl cytidine
cggtgggaagacacaaagtg

SEQ ID NO: 733 - DNA, 20 bp, synthetic construct
  source 1..20: mol_type = other DNA
  modified_base 1..20: mod_base = OTHER; note = Phosphorothioate linkage
  modified_base 1..5: mod_base = OTHER; note = 2'-O-(2-methoxyethyl) ribonucleotide
  misc_feature 1..5: note = RNA
  misc_feature 6..15: note = DNA
  misc_feature 16..20: note = RNA
  modified_base 16..20: mod_base = OTHER; note = 2'-O-(2-methoxyethyl) ribonucleotide
  modified_base 1: mod_base = OTHER; note = 5-methyl cytidine
  modified_base 5: mod_base = OTHER; note = 5-methyl cytidine
  modified_base 12: mod_base = OTHER; note = 5-methyl cytidine
cgtgcagaaaacaggaaaga

SEQ ID NO: 734 - DNA, 20 bp, synthetic construct
  source 1..20: mol_type = other DNA
  modified_base 1..20: mod_base = OTHER; note = Phosphorothioate linkage
  modified_base 1..5: mod_base = OTHER; note = 2'-O-(2-methoxyethyl) ribonucleotide
  misc_feature 1..5: note = RNA
  misc_feature 6..15: note = DNA
  misc_feature 16..20: note = RNA
  modified_base 16..20: mod_base = OTHER; note = 2'-O-(2-methoxyethyl) ribonucleotide
  modified_base 1..3: mod_base = OTHER; note = 5-methyl cytidine
  modified_base 7: mod_base = OTHER; note = 5-methyl cytidine
  modified_base 14: mod_base = OTHER; note = 5-methyl cytidine
cccgtgcagaaaacaggaaa

SEQ ID NO: 735 - DNA, 20 bp, synthetic construct
  source 1..20: mol_type = other DNA
  modified_base 1..20: mod_base = OTHER; note = Phosphorothioate linkage
  modified_base 1..5: mod_base = OTHER; note = 2'-O-(2-methoxyethyl) ribonucleotide
  misc_feature 1..5: note = RNA
  misc_feature 6..15: note = DNA
  misc_feature 16..20: note = RNA
  modified_base 16..20: mod_base = OTHER; note = 2'-O-(2-methoxyethyl) ribonucleotide
  modified_base 3: mod_base = OTHER; note = 5-methyl cytidine
  modified_base 5..7: mod_base = OTHER; note = 5-methyl cytidine
  modified_base 11: mod_base = OTHER; note = 5-methyl cytidine
  modified_base 18: mod_base = OTHER; note = 5-methyl cytidine
tgctcccgtgcagaaaacag

SEQ ID NO: 736 - DNA, 20 bp, synthetic construct
  source 1..20: mol_type = other DNA
  modified_base 1..20: mod_base = OTHER; note = Phosphorothioate linkage
  modified_base 1: mod_base = OTHER; note = 2'-O-(2-methoxyethyl) ribonucleotide
  modified_base 2: mod_base = OTHER; note = Locked nucleic acid
  modified_base 3: mod_base = OTHER; note = 2'-O-(2-methoxyethyl) ribonucleotide
  modified_base 4: mod_base = OTHER; note = Locked nucleic acid
  modified_base 5: mod_base = OTHER; note = 2'-O-(2-methoxyethyl) ribonucleotide
  misc_feature 1..5: note = RNA
  misc_feature 6..15: note = DNA
  misc_feature 16..20: note = RNA
  modified_base 16: mod_base = OTHER; note = 2'-O-(2-methoxyethyl) ribonucleotide
  modified_base 17: mod_base = OTHER; note = Locked nucleic acid
  modified_base 18: mod_base = OTHER; note = 2'-O-(2-methoxyethyl) ribonucleotide
  modified_base 19: mod_base = OTHER; note = Locked nucleic acid
  modified_base 20: mod_base = OTHER; note = 2'-O-(2-methoxyethyl) ribonucleotide
  modified_base 1: mod_base = OTHER; note = 5-methyl cytidine
  modified_base 7..8: mod_base = OTHER; note = 5-methyl cytidine
  modified_base 12..14: mod_base = OTHER; note = 5-methyl cytidine
  modified_base 16: mod_base = OTHER; note = 5-methyl cytidine
caagtgccaggcccacatgg

SEQ ID NO: 737 - DNA, 20 bp, synthetic construct
  source 1..20: mol_type = other DNA
  modified_base 1..20: mod_base = OTHER; note = Phosphorothioate linkage
  modified_base 1: mod_base = OTHER; note = 2'-O-(2-methoxyethyl) ribonucleotide
  modified_base 2: mod_base = OTHER; note = Locked nucleic acid
  modified_base 3: mod_base = OTHER; note = 2'-O-(2-methoxyethyl) ribonucleotide
  modified_base 4: mod_base = OTHER; note = Locked nucleic acid
  modified_base 5: mod_base = OTHER; note = 2'-O-(2-methoxyethyl) ribonucleotide
  misc_feature 1..5: note = RNA
  misc_feature 6..15: note = DNA
  misc_feature 16..20: note = RNA
  modified_base 16: mod_base = OTHER; note = 2'-O-(2-methoxyethyl) ribonucleotide
  modified_base 17: mod_base = OTHER; note = Locked nucleic acid
  modified_base 18: mod_base = OTHER; note = 2'-O-(2-methoxyethyl) ribonucleotide
  modified_base 19: mod_base = OTHER; note = Locked nucleic acid
  modified_base 20: mod_base = OTHER; note = 2'-O-(2-methoxyethyl) ribonucleotide
  modified_base 8: mod_base = OTHER; note = 5-methyl cytidine
  modified_base 10: mod_base = OTHER; note = 5-methyl cytidine
gggaagacacaaagtgatgt

SEQ ID NO: 738 - DNA, 20 bp, synthetic construct
  source 1..20: mol_type = other DNA
  modified_base 1..20: mod_base = OTHER; note = Phosphorothioate linkage
  modified_base 1: mod_base = OTHER; note = 2'-O-(2-methoxyethyl) ribonucleotide
  modified_base 2: mod_base = OTHER; note = Locked nucleic acid
  modified_base 3: mod_base = OTHER; note = 2'-O-(2-methoxyethyl) ribonucleotide
  modified_base 4: mod_base = OTHER; note = Locked nucleic acid
  modified_base 5: mod_base = OTHER; note = 2'-O-(2-methoxyethyl) ribonucleotide
  misc_feature 1..5: note = RNA
  misc_feature 6..15: note = DNA
  misc_feature 16..20: note = RNA
  modified_base 16: mod_base = OTHER; note = 2'-O-(2-methoxyethyl) ribonucleotide
  modified_base 17: mod_base = OTHER; note = Locked nucleic acid
  modified_base 18: mod_base = OTHER; note = 2'-O-(2-methoxyethyl) ribonucleotide
  modified_base 19: mod_base = OTHER; note = Locked nucleic acid
  modified_base 20: mod_base = OTHER; note = 2'-O-(2-methoxyethyl) ribonucleotide
  modified_base 3: mod_base = OTHER; note = 5-methyl cytidine
  modified_base 5..7: mod_base = OTHER; note = 5-methyl cytidine
  modified_base 11: mod_base = OTHER; note = 5-methyl cytidine
  modified_base 18: mod_base = OTHER; note = 5-methyl cytidine
tgctcccgtgcagaaaacag

SEQ ID NO: 739 - DNA, 20 bp, synthetic construct
  source 1..20: mol_type = other DNA
  modified_base 1..20: mod_base = OTHER; note = Phosphorothioate linkage
  modified_base 1..2: mod_base = OTHER; note = 2'-O-(2-methoxyethyl) ribonucleotide
  modified_base 3: mod_base = OTHER; note = Locked nucleic acid
  modified_base 4: mod_base = OTHER; note = 2'-O-(2-methoxyethyl) ribonucleotide
  modified_base 5: mod_base = OTHER; note = Locked nucleic acid
  misc_feature 1..5: note = RNA
  misc_feature 6..15: note = DNA
  misc_feature 16..20: note = RNA
  modified_base 16: mod_base = OTHER; note = Locked nucleic acid
  modified_base 17: mod_base = OTHER; note = 2'-O-(2-methoxyethyl) ribonucleotide
  modified_base 18: mod_base = OTHER; note = Locked nucleic acid
  modified_base 19..20: mod_base = OTHER; note = 2'-O-(2-methoxyethyl) ribonucleotide
  modified_base 2: mod_base = OTHER; note = 5-methyl cytidine
  modified_base 8..9: mod_base = OTHER; note = 5-methyl cytidine
  modified_base 13..15: mod_base = OTHER; note = 5-methyl cytidine
  modified_base 17: mod_base = OTHER; note = 5-methyl cytidine
gcaagtgccaggcccacatg

SEQ ID NO: 740 - DNA, 20 bp, synthetic construct
  source 1..20: mol_type = other DNA
  modified_base 1..20: mod_base = OTHER; note = Phosphorothioate linkage
  modified_base 1..2: mod_base = OTHER; note = 2'-O-(2-methoxyethyl) ribonucleotide
  modified_base 3: mod_base = OTHER; note = Locked nucleic acid
  modified_base 4: mod_base = OTHER; note = 2'-O-(2-methoxyethyl) ribonucleotide
  modified_base 5: mod_base = OTHER; note = Locked nucleic acid
  misc_feature 1..5: note = RNA
  misc_feature 6..15: note = DNA
  misc_feature 16..20: note = RNA
  modified_base 16: mod_base = OTHER; note = Locked nucleic acid
  modified_base 17: mod_base = OTHER; note = 2'-O-(2-methoxyethyl) ribonucleotide
  modified_base 18: mod_base = OTHER; note = Locked nucleic acid
  modified_base 19..20: mod_base = OTHER; note = 2'-O-(2-methoxyethyl) ribonucleotide
  modified_base 9: mod_base = OTHER; note = 5-methyl cytidine
  modified_base 11: mod_base = OTHER; note = 5-methyl cytidine
tgggaagacacaaagtgatg

SEQ ID NO: 741 - DNA, 20 bp, synthetic construct
  source 1..20: mol_type = other DNA
  modified_base 1..20: mod_base = OTHER; note = Phosphorothioate linkage
  modified_base 1..2: mod_base = OTHER; note = 2'-O-(2-methoxyethyl) ribonucleotide
  modified_base 3: mod_base = OTHER; note = Locked nucleic acid
  modified_base 4: mod_base = OTHER; note = 2'-O-(2-methoxyethyl) ribonucleotide
  modified_base 5: mod_base = OTHER; note = Locked nucleic acid
  misc_feature 1..5: note = RNA
  misc_feature 6..15: note = DNA
  misc_feature 16..20: note = RNA
  modified_base 16: mod_base = OTHER; note = Locked nucleic acid
  modified_base 17: mod_base = OTHER; note = 2'-O-(2-methoxyethyl) ribonucleotide
  modified_base 18: mod_base = OTHER; note = Locked nucleic acid
  modified_base 19..20: mod_base = OTHER; note = 2'-O-(2-methoxyethyl) ribonucleotide
  modified_base 2: mod_base = OTHER; note = 5-methyl cytidine
  modified_base 4..6: mod_base = OTHER; note = 5-methyl cytidine
  modified_base 10: mod_base = OTHER; note = 5-methyl cytidine
  modified_base 17: mod_base = OTHER; note = 5-methyl cytidine
gctcccgtgcagaaaacagg

SEQ ID NO: 742 - DNA, 20 bp, synthetic construct
  source 1..20: mol_type = other DNA
  modified_base 1..20: mod_base = OTHER; note = Phosphorothioate linkage
  modified_base 1..5: mod_base = OTHER; note = 2'-O-(2-methoxyethyl) ribonucleotide
  misc_feature 1..5: note = RNA
  misc_feature 6..15: note = DNA
  misc_feature 16..20: note = RNA
  modified_base 16..20: mod_base = OTHER; note = 2'-O-(2-methoxyethyl) ribonucleotide
  modified_base 1: mod_base = OTHER; note = 5-methyl cytidine
  modified_base 3: mod_base = OTHER; note = 5-methyl cytidine
  modified_base 20: mod_base = OTHER; note = 5-methyl cytidine
ctctggtgtgtttttgagtc

SEQ ID NO: 743 - DNA, 20 bp, synthetic construct
  source 1..20: mol_type = other DNA
  modified_base 1..20: mod_base = OTHER; note = Phosphorothioate linkage
  modified_base 1..5: mod_base = OTHER; note = 2'-O-(2-methoxyethyl) ribonucleotide
  misc_feature 1..5: note = RNA
  misc_feature 6..15: note = DNA
  misc_feature 16..20: note = RNA
  modified_base 16..20: mod_base = OTHER; note = 2'-O-(2-methoxyethyl) ribonucleotide
  modified_base 2: mod_base = OTHER; note = 5-methyl cytidine
  modified_base 4: mod_base = OTHER; note = 5-methyl cytidine
  modified_base 6: mod_base = OTHER; note = 5-methyl cytidine
tctctctggtgtgtttttga

SEQ ID NO: 744 - DNA, 20 bp, synthetic construct
  source 1..20: mol_type = other DNA
  modified_base 1..20: mod_base = OTHER; note = Phosphorothioate linkage
  modified_base 1..5: mod_base = OTHER; note = 2'-O-(2-methoxyethyl) ribonucleotide
  misc_feature 1..5: note = RNA
  misc_feature 6..15: note = DNA
  misc_feature 16..20: note = RNA
  modified_base 16..20: mod_base = OTHER; note = 2'-O-(2-methoxyethyl) ribonucleotide
  modified_base 5..6: mod_base = OTHER; note = 5-methyl cytidine
  modified_base 8: mod_base = OTHER; note = 5-methyl cytidine
  modified_base 12: mod_base = OTHER; note = 5-methyl cytidine
  modified_base 14: mod_base = OTHER; note = 5-methyl cytidine
  modified_base 16: mod_base = OTHER; note = 5-methyl cytidine
  modified_base 18: mod_base = OTHER; note = 5-methyl cytidine
aggacctctgtctctctctg

SEQ ID NO: 745 - DNA, 20 bp, synthetic construct
  source 1..20: mol_type = other DNA
  modified_base 1..20: mod_base = OTHER; note = Phosphorothioate linkage
  modified_base 1..5: mod_base = OTHER; note = 2'-O-(2-methoxyethyl) ribonucleotide
  misc_feature 1..5: note = RNA
  misc_feature 6..15: note = DNA
  misc_feature 16..20: note = RNA
  modified_base 16..20: mod_base = OTHER; note = 2'-O-(2-methoxyethyl) ribonucleotide
  modified_base 1: mod_base = OTHER; note = 5-methyl cytidine
  modified_base 9..10: mod_base = OTHER; note = 5-methyl cytidine
  modified_base 12: mod_base = OTHER; note = 5-methyl cytidine
  modified_base 16: mod_base = OTHER; note = 5-methyl cytidine
  modified_base 18: mod_base = OTHER; note = 5-methyl cytidine
  modified_base 20: mod_base = OTHER; note = 5-methyl cytidine
ctttaggacctctgtctctc

SEQ ID NO: 746 - DNA, 20 bp, synthetic construct
  source 1..20: mol_type = other DNA
  modified_base 1..20: mod_base = OTHER; note = Phosphorothioate linkage
  modified_base 1..5: mod_base = OTHER; note = 2'-O-(2-methoxyethyl) ribonucleotide
  misc_feature 1..5: note = RNA
  misc_feature 6..15: note = DNA
  misc_feature 16..20: note = RNA
  modified_base 16..20: mod_base = OTHER; note = 2'-O-(2-methoxyethyl) ribonucleotide
  modified_base 1: mod_base = OTHER; note = 5-methyl cytidine
  modified_base 4: mod_base = OTHER; note = 5-methyl cytidine
  modified_base 12..13: mod_base = OTHER; note = 5-methyl cytidine
  modified_base 15: mod_base = OTHER; note = 5-methyl cytidine
  modified_base 19: mod_base = OTHER; note = 5-methyl cytidine
catctttaggacctctgtct

SEQ ID NO: 747 - DNA, 20 bp, synthetic construct
  source 1..20: mol_type = other DNA
  modified_base 1..20: mod_base = OTHER; note = Phosphorothioate linkage
  modified_base 1..5: mod_base = OTHER; note = 2'-O-(2-methoxyethyl) ribonucleotide
  misc_feature 1..5: note = RNA
  misc_feature 6..15: note = DNA
  misc_feature 16..20: note = RNA
  modified_base 16..20: mod_base = OTHER; note = 2'-O-(2-methoxyethyl) ribonucleotide
  modified_base 6: mod_base = OTHER; note = 5-methyl cytidine
  modified_base 8: mod_base = OTHER; note = 5-methyl cytidine
  modified_base 10: mod_base = OTHER; note = 5-methyl cytidine
  modified_base 14: mod_base = OTHER; note = 5-methyl cytidine
  modified_base 16: mod_base = OTHER; note = 5-methyl cytidine
agggtctctctgtctcaggg

SEQ ID NO: 748 - DNA, 20 bp, synthetic construct
  source 1..20: mol_type = other DNA
  modified_base 1..20: mod_base = OTHER; note = Phosphorothioate linkage
  modified_base 1..5: mod_base = OTHER; note = 2'-O-(2-methoxyethyl) ribonucleotide
  misc_feature 1..5: note = RNA
  misc_feature 6..15: note = DNA
  misc_feature 16..20: note = RNA
  modified_base 16..20: mod_base = OTHER; note = 2'-O-(2-methoxyethyl) ribonucleotide
  modified_base 1: mod_base = OTHER; note = 5-methyl cytidine
  modified_base 8: mod_base = OTHER; note = 5-methyl cytidine
  modified_base 10: mod_base = OTHER; note = 5-methyl cytidine
  modified_base 12: mod_base = OTHER; note = 5-methyl cytidine
  modified_base 16: mod_base = OTHER; note = 5-methyl cytidine
  modified_base 18: mod_base = OTHER; note = 5-methyl cytidine
ctagggtctctctgtctcag

SEQ ID NO: 749 - DNA, 20 bp, synthetic construct
  source 1..20: mol_type = other DNA
  modified_base 1..20: mod_base = OTHER; note = Phosphorothioate linkage
  modified_base 1..5: mod_base = OTHER; note = 2'-O-(2-methoxyethyl) ribonucleotide
  misc_feature 1..5: note = RNA
  misc_feature 6..15: note = DNA
  misc_feature 16..20: note = RNA
  modified_base 16..20: mod_base = OTHER; note = 2'-O-(2-methoxyethyl) ribonucleotide
  modified_base 4: mod_base = OTHER; note = 5-methyl cytidine
  modified_base 11: mod_base = OTHER; note = 5-methyl cytidine
  modified_base 13: mod_base = OTHER; note = 5-methyl cytidine
  modified_base 15: mod_base = OTHER; note = 5-methyl cytidine
  modified_base 19: mod_base = OTHER; note = 5-methyl cytidine
ggtctagggtctctctgtct

SEQ ID NO: 750 - DNA, 20 bp, synthetic construct
  source 1..20: mol_type = other DNA
  modified_base 1..20: mod_base = OTHER; note = Phosphorothioate linkage
  modified_base 1..5: mod_base = OTHER; note = 2'-O-(2-methoxyethyl) ribonucleotide
  misc_feature 1..5: note = RNA
  misc_feature 6..15: note = DNA
  misc_feature 16..20: note = RNA
  modified_base 16..20: mod_base = OTHER; note = 2'-O-(2-methoxyethyl) ribonucleotide
  modified_base 6: mod_base = OTHER; note = 5-methyl cytidine
  modified_base 13: mod_base = OTHER; note = 5-methyl cytidine
  modified_base 15: mod_base = OTHER; note = 5-methyl cytidine
  modified_base 17: mod_base = OTHER; note = 5-methyl cytidine
tgggtctagggtctctctgt

SEQ ID NO: 751 - DNA, 20 bp, synthetic construct
  source 1..20: mol_type = other DNA
  modified_base 1..20: mod_base = OTHER; note = Phosphorothioate linkage
  modified_base 1..5: mod_base = OTHER; note = 2'-O-(2-methoxyethyl) ribonucleotide
  misc_feature 1..5: note = RNA
  misc_feature 6..15: note = DNA
  misc_feature 16..20: note = RNA
  modified_base 16..20: mod_base = OTHER; note = 2'-O-(2-methoxyethyl) ribonucleotide
  modified_base 1: mod_base = OTHER; note = 5-methyl cytidine
  modified_base 9: mod_base = OTHER; note = 5-methyl cytidine
  modified_base 16: mod_base = OTHER; note = 5-methyl cytidine
  modified_base 18: mod_base = OTHER; note = 5-methyl cytidine
  modified_base 20: mod_base = OTHER; note = 5-methyl cytidine
ctgtgggtctagggtctctc

SEQ ID NO: 752 - DNA, 20 bp, synthetic construct
  source 1..20: mol_type = other DNA
  modified_base 1..20: mod_base = OTHER; note = Phosphorothioate linkage
  modified_base 1..5: mod_base = OTHER; note = 2'-O-(2-methoxyethyl) ribonucleotide
  misc_feature 1..5: note = RNA
  misc_feature 6..15: note = DNA
  misc_feature 16..20: note = RNA
  modified_base 16..20: mod_base = OTHER; note = 2'-O-(2-methoxyethyl) ribonucleotide
  modified_base 1: mod_base = OTHER; note = 5-methyl cytidine
  modified_base 3: mod_base = OTHER; note = 5-methyl cytidine
  modified_base 11: mod_base = OTHER; note = 5-methyl cytidine
  modified_base 18: mod_base = OTHER; note = 5-methyl cytidine
  modified_base 20: mod_base = OTHER; note = 5-methyl cytidine
ctctgtgggtctagggtctc

SEQ ID NO: 753 - DNA, 20 bp, synthetic construct
  source 1..20: mol_type = other DNA
  modified_base 1..20: mod_base = OTHER; note = Phosphorothioate linkage
  modified_base 1..5: mod_base = OTHER; note = 2'-O-(2-methoxyethyl) ribonucleotide
  misc_feature 1..5: note = RNA
  misc_feature 6..15: note = DNA
  misc_feature 16..20: note = RNA
  modified_base 16..20: mod_base = OTHER; note = 2'-O-(2-methoxyethyl) ribonucleotide
  modified_base 3: mod_base = OTHER; note = 5-methyl cytidine
  modified_base 5: mod_base = OTHER; note = 5-methyl cytidine
  modified_base 13: mod_base = OTHER; note = 5-methyl cytidine
  modified_base 20: mod_base = OTHER; note = 5-methyl cytidine
ttctctgtgggtctagggtc

SEQ ID NO: 754 - DNA, 20 bp, synthetic construct
  source 1..20: mol_type = other DNA
  modified_base 1..20: mod_base = OTHER; note = Phosphorothioate linkage
  modified_base 1..5: mod_base = OTHER; note = 2'-O-(2-methoxyethyl) ribonucleotide
  misc_feature 1..5: note = RNA
  misc_feature 6..15: note = DNA
  misc_feature 16..20: note = RNA
  modified_base 16..20: mod_base = OTHER; note = 2'-O-(2-methoxyethyl) ribonucleotide
  modified_base 3: mod_base = OTHER; note = 5-methyl cytidine
  modified_base 7: mod_base = OTHER; note = 5-methyl cytidine
  modified_base 9: mod_base = OTHER; note = 5-methyl cytidine
  modified_base 17: mod_base = OTHER; note = 5-methyl cytidine
atctttctctgtgggtctag

SEQ ID NO: 755 - DNA, 20 bp, synthetic construct
  source 1..20: mol_type = other DNA
  modified_base 1..20: mod_base = OTHER; note = Phosphorothioate linkage
  modified_base 1..5: mod_base = OTHER; note = 2'-O-(2-methoxyethyl) ribonucleotide
  misc_feature 1..5: note = RNA
  misc_feature 6..15: note = DNA
  misc_feature 16..20: note = RNA
  modified_base 16..20: mod_base = OTHER; note = 2'-O-(2-methoxyethyl) ribonucleotide
  modified_base 7: mod_base = OTHER; note = 5-methyl cytidine
  modified_base 11: mod_base = OTHER; note = 5-methyl cytidine
  modified_base 13: mod_base = OTHER; note = 5-methyl cytidine
aagtatctttctctgtgggt

SEQ ID NO: 756 - DNA, 20 bp, synthetic construct
  source 1..20: mol_type = other DNA
  modified_base 1..20: mod_base = OTHER; note = Phosphorothioate linkage
  modified_base 1..5: mod_base = OTHER; note = 2'-O-(2-methoxyethyl) ribonucleotide
  misc_feature 1..5: note = RNA
  misc_feature 6..15: note = DNA
  misc_feature 16..20: note = RNA
  modified_base 16..20: mod_base = OTHER; note = 2'-O-(2-methoxyethyl) ribonucleotide
  modified_base 10: mod_base = OTHER; note = 5-methyl cytidine
  modified_base 14: mod_base = OTHER; note = 5-methyl cytidine
  modified_base 16: mod_base = OTHER; note = 5-methyl cytidine
gtgaagtatctttctctgtg

SEQ ID NO: 757 - DNA, 20 bp, synthetic construct
  source 1..20: mol_type = other DNA
  modified_base 1..20: mod_base = OTHER; note = Phosphorothioate linkage
  modified_base 1..5: mod_base = OTHER; note = 2'-O-(2-methoxyethyl) ribonucleotide
  misc_feature 1..5: note = RNA
  misc_feature 6..15: note = DNA
  misc_feature 16..20: note = RNA
  modified_base 16..20: mod_base = OTHER; note = 2'-O-(2-methoxyethyl) ribonucleotide
  modified_base 12: mod_base = OTHER; note = 5-methyl cytidine
  modified_base 16: mod_base = OTHER; note = 5-methyl cytidine
  modified_base 18: mod_base = OTHER; note = 5-methyl cytidine
tggtgaagtatctttctctg

SEQ ID NO: 758 - DNA, 20 bp, synthetic construct
  source 1..20: mol_type = other DNA
  modified_base 1..20: mod_base = OTHER; note = Phosphorothioate linkage
  modified_base 1..5: mod_base = OTHER; note = 2'-O-(2-methoxyethyl) ribonucleotide
  misc_feature 1..5: note = RNA
  misc_feature 6..15: note = DNA
  misc_feature 16..20: note = RNA
  modified_base 16..20: mod_base = OTHER; note = 2'-O-(2-methoxyethyl) ribonucleotide
  modified_base 1: mod_base = OTHER; note = 5-methyl cytidine
  modified_base 3: mod_base = OTHER; note = 5-methyl cytidine
  modified_base 10..13: mod_base = OTHER; note = 5-methyl cytidine
  modified_base 15: mod_base = OTHER; note = 5-methyl cytidine
ctcaaattaccccacagtgg

SEQ ID NO: 759 - DNA, 20 bp, synthetic construct
  source 1..20: mol_type = other DNA
  modified_base 1..20: mod_base = OTHER; note = Phosphorothioate linkage
  modified_base 1..5: mod_base = OTHER; note = 2'-O-(2-methoxyethyl) ribonucleotide
  misc_feature 1..5: note = RNA
  misc_feature 6..15: note = DNA
  misc_feature 16..20: note = RNA
  modified_base 16..20: mod_base = OTHER; note = 2'-O-(2-methoxyethyl) ribonucleotide
  modified_base 5: mod_base = OTHER; note = 5-methyl cytidine
  modified_base 7: mod_base = OTHER; note = 5-methyl cytidine
  modified_base 14..17: mod_base = OTHER; note = 5-methyl cytidine
  modified_base 18: mod_base = OTHER; note = 5-methyl cytidine
gtgtctcaaattaccccaca

SEQ ID NO: 760 - DNA, 20 bp, synthetic construct
  source 1..20: mol_type = other DNA
  modified_base 1..20: mod_base = OTHER; note = Phosphorothioate linkage
  modified_base 1..5: mod_base = OTHER; note = 2'-O-(2-methoxyethyl) ribonucleotide
  misc_feature 1..5: note = RNA
  misc_feature 6..15: note = DNA
  misc_feature 16..20: note = RNA
  modified_base 16..20: mod_base = OTHER; note = 2'-O-(2-methoxyethyl) ribonucleotide
  modified_base 1: mod_base = OTHER; note = 5-methyl cytidine
  modified_base 7: mod_base = OTHER; note = 5-methyl cytidine
  modified_base 9: mod_base = OTHER; note = 5-methyl cytidine
  modified_base 16..19: mod_base = OTHER; note = 5-methyl cytidine
ctgtgtctcaaattacccca

SEQ ID NO: 761 - DNA, 20 bp, synthetic construct
  source 1..20: mol_type = other DNA
  modified_base 1..20: mod_base = OTHER; note = Phosphorothioate linkage
  modified_base 1..5: mod_base = OTHER; note = 2'-O-(2-methoxyethyl) ribonucleotide
  misc_feature 1..5: note = RNA
  misc_feature 6..15: note = DNA
  misc_feature 16..20: note = RNA
  modified_base 16..20: mod_base = OTHER; note = 2'-O-(2-methoxyethyl) ribonucleotide
  modified_base 1..3: mod_base = OTHER; note = 5-methyl cytidine
  modified_base 9: mod_base = OTHER; note = 5-methyl cytidine
  modified_base 11: mod_base = OTHER; note = 5-methyl cytidine
  modified_base 18..20: mod_base = OTHER; note = 5-methyl cytidine
ccctgtgtctcaaattaccc

SEQ ID NO: 762 - DNA, 20 bp, synthetic construct
  source 1..20: mol_type = other DNA
  modified_base 1..20: mod_base = OTHER; note = Phosphorothioate linkage
  modified_base 1..5: mod_base = OTHER; note = 2'-O-(2-methoxyethyl) ribonucleotide
  misc_feature 1..5: note = RNA
  misc_feature 6..15: note = DNA
  misc_feature 16..20: note = RNA
  modified_base 16..20: mod_base = OTHER; note = 2'-O-(2-methoxyethyl) ribonucleotide
  modified_base 5..7: mod_base = OTHER; note = 5-methyl cytidine
  modified_base 13: mod_base = OTHER; note = 5-methyl cytidine
  modified_base 15: mod_base = OTHER; note = 5-methyl cytidine
ttggccctgtgtctcaaatt

SEQ ID NO: 763 - DNA, 20 bp, synthetic construct
  source 1..20: mol_type = other DNA
  modified_base 1..20: mod_base = OTHER; note = Phosphorothioate linkage
  modified_base 1..5: mod_base = OTHER; note = 2'-O-(2-methoxyethyl) ribonucleotide
  misc_feature 1..5: note = RNA
  misc_feature 6..15: note = DNA
  misc_feature 16..20: note = RNA
  modified_base 16..20: mod_base = OTHER; note = 2'-O-(2-methoxyethyl) ribonucleotide
  modified_base 7..9: mod_base = OTHER; note = 5-methyl cytidine
  modified_base 15: mod_base = OTHER; note = 5-methyl cytidine
  modified_base 17: mod_base = OTHER; note = 5-methyl cytidine
ttttggccctgtgtctcaaa

SEQ ID NO: 764 - DNA, 20 bp, synthetic construct
  source 1..20: mol_type = other DNA
  modified_base 1..20: mod_base = OTHER; note = Phosphorothioate linkage
  modified_base 1..5: mod_base = OTHER; note = 2'-O-(2-methoxyethyl) ribonucleotide
  misc_feature 1..5: note = RNA
  misc_feature 6..15: note = DNA
  misc_feature 16..20: note = RNA
  modified_base 16..20: mod_base = OTHER; note = 2'-O-(2-methoxyethyl) ribonucleotide
  modified_base 1: mod_base = OTHER; note = 5-methyl cytidine
  modified_base 12..14: mod_base = OTHER; note = 5-methyl cytidine
  modified_base 19: mod_base = OTHER; note = 5-methyl cytidine
ctagattttggccctgtgtc

SEQ ID NO: 765 - DNA, 20 bp, synthetic construct
  source 1..20: mol_type = other DNA
  modified_base 1..20: mod_base = OTHER; note = Phosphorothioate linkage
  modified_base 1..5: mod_base = OTHER; note = 2'-O-(2-methoxyethyl) ribonucleotide
  misc_feature 1..5: note = RNA
  misc_feature 6..15: note = DNA
  misc_feature 16..20: note = RNA
  modified_base 16..20: mod_base = OTHER; note = 2'-O-(2-methoxyethyl) ribonucleotide
  modified_base 3..4: mod_base = OTHER; note = 5-methyl cytidine
  modified_base 6: mod_base = OTHER; note = 5-methyl cytidine
  modified_base 17..19: mod_base = OTHER; note = 5-methyl cytidine
ttcctctagattttggccct

SEQ ID NO: 766 - DNA, 20 bp, synthetic construct
  source 1..20: mol_type = other DNA
  modified_base 1..20: mod_base = OTHER; note = Phosphorothioate linkage
  modified_base 1..5: mod_base = OTHER; note = 2'-O-(2-methoxyethyl) ribonucleotide
  misc_feature 1..5: note = RNA
  misc_feature 6..15: note = DNA
  misc_feature 16..20: note = RNA
  modified_base 16..20: mod_base = OTHER; note = 2'-O-(2-methoxyethyl) ribonucleotide
  modified_base 1: mod_base = OTHER; note = 5-methyl cytidine
  modified_base 6..7: mod_base = OTHER; note = 5-methyl cytidine
  modified_base 9: mod_base = OTHER; note = 5-methyl cytidine
  modified_base 20: mod_base = OTHER; note = 5-methyl cytidine
cttttcctctagattttggc

SEQ ID NO: 767 - DNA, 20 bp, synthetic construct
  source 1..20: mol_type = other DNA
  modified_base 1..20: mod_base = OTHER; note = Phosphorothioate linkage
  modified_base 1..5: mod_base = OTHER; note = 2'-O-(2-methoxyethyl) ribonucleotide
  misc_feature 1..5: note = RNA
  misc_feature 6..15: note = DNA
  misc_feature 16..20: note = RNA
  modified_base 16..20: mod_base = OTHER; note = 2'-O-(2-methoxyethyl) ribonucleotide
  modified_base 4: mod_base = OTHER; note = 5-methyl cytidine
  modified_base 6: mod_base = OTHER; note = 5-methyl cytidine
  modified_base 11..12: mod_base = OTHER; note = 5-methyl cytidine
  modified_base 14: mod_base = OTHER; note = 5-methyl cytidine
agtctcttttcctctagatt

SEQ ID NO: 768 - DNA, 20 bp, synthetic construct
  source 1..20: mol_type = other DNA
  modified_base 1..20: mod_base = OTHER; note = Phosphorothioate linkage
  modified_base 1..5: mod_base = OTHER; note = 2'-O-(2-methoxyethyl) ribonucleotide
  misc_feature 1..5: note = RNA
  misc_feature 6..15: note = DNA
  misc_feature 16..20: note = RNA
  modified_base 16..20: mod_base = OTHER; note = 2'-O-(2-methoxyethyl) ribonucleotide
  modified_base 1: mod_base = OTHER; note = 5-methyl cytidine
  modified_base 6: mod_base = OTHER; note = 5-methyl cytidine
  modified_base 13: mod_base = OTHER; note = 5-methyl cytidine
  modified_base 15: mod_base = OTHER; note = 5-methyl cytidine
  modified_base 20: mod_base = OTHER; note = 5-methyl cytidine
caaatcaggagtctcttttc

SEQ ID NO: 769 - DNA, 20 bp, synthetic construct
  source 1..20: mol_type = other DNA
  modified_base 1..20: mod_base = OTHER; note = Phosphorothioate linkage
  modified_base 1..5: mod_base = OTHER; note = 2'-O-(2-methoxyethyl) ribonucleotide
  misc_feature 1..5: note = RNA
  misc_feature 6..15: note = DNA
  misc_feature 16..20: note = RNA
  modified_base 16..20: mod_base = OTHER; note = 2'-O-(2-methoxyethyl) ribonucleotide
  modified_base 1..2: mod_base = OTHER; note = 5-methyl cytidine
  modified_base 4: mod_base = OTHER; note = 5-methyl cytidine
  modified_base 9: mod_base = OTHER; note = 5-methyl cytidine
  modified_base 16: mod_base = OTHER; note = 5-methyl cytidine
  modified_base 18: mod_base = OTHER; note = 5-methyl cytidine
cctcaaatcaggagtctctt

SEQ ID NO: 770 - DNA, 20 bp, synthetic construct
  source 1..20: mol_type = other DNA
  modified_base 1..20: mod_base = OTHER; note = Phosphorothioate linkage
  modified_base 1..5: mod_base = OTHER; note = 2'-O-(2-methoxyethyl) ribonucleotide
  misc_feature 1..5: note = RNA
  misc_feature 6..15: note = DNA
  misc_feature 16..20: note = RNA
  modified_base 16..20: mod_base = OTHER; note = 2'-O-(2-methoxyethyl) ribonucleotide
  modified_base 1: mod_base = OTHER; note = 5-methyl cytidine
  modified_base 9..10: mod_base = OTHER; note = 5-methyl cytidine
  modified_base 12: mod_base = OTHER; note = 5-methyl cytidine
  modified_base 17: mod_base = OTHER; note = 5-methyl cytidine
cgttttttcctcaaatcagg

SEQ ID NO: 771 - DNA, 20 bp, synthetic construct
  source 1..20: mol_type = other DNA
  modified_base 1..20: mod_base = OTHER; note = Phosphorothioate linkage
  modified_base 1..5: mod_base = OTHER; note = 2'-O-(2-methoxyethyl) ribonucleotide
  misc_feature 1..5: note = RNA
  misc_feature 6..15: note = DNA
  misc_feature 16..20: note = RNA
  modified_base 16..20: mod_base = OTHER; note = 2'-O-(2-methoxyethyl) ribonucleotide
  modified_base 3: mod_base = OTHER; note = 5-methyl cytidine
  modified_base 11..12: mod_base = OTHER; note = 5-methyl cytidine
  modified_base 14: mod_base = OTHER; note = 5-methyl cytidine
  modified_base 19: mod_base = OTHER; note = 5-methyl cytidine
gtcgttttttcctcaaatca

SEQ ID NO: 772 - DNA, 20 bp, synthetic construct
  source 1..20: mol_type = other DNA
  modified_base 1..20: mod_base = OTHER; note = Phosphorothioate linkage
  modified_base 1..5: mod_base = OTHER; note = 2'-O-(2-methoxyethyl) ribonucleotide
  misc_feature 1..5: note = RNA
  misc_feature 6..15: note = DNA
  misc_feature 16..20: note = RNA
  modified_base 16..20: mod_base = OTHER; note = 2'-O-(2-methoxyethyl) ribonucleotide
  modified_base 10: mod_base = OTHER; note = 5-methyl cytidine
  modified_base 13: mod_base = OTHER; note = 5-methyl cytidine
  modified_base 15: mod_base = OTHER; note = 5-methyl cytidine
  modified_base 17: mod_base = OTHER; note = 5-methyl cytidine
  modified_base 19: mod_base = OTHER; note = 5-methyl cytidine
gatattgagcttctctctct

SEQ ID NO: 773 - DNA, 20 bp, synthetic construct
  source 1..20: mol_type = other DNA
  modified_base 1..20: mod_base = OTHER; note = Phosphorothioate linkage
  modified_base 1..5: mod_base = OTHER; note = 2'-O-(2-methoxyethyl) ribonucleotide
  misc_feature 1..5: note = RNA
  misc_feature 6..15: note = DNA
  misc_feature 16..20: note = RNA
  modified_base 16..20: mod_base = OTHER; note = 2'-O-(2-methoxyethyl) ribonucleotide
  modified_base 13: mod_base = OTHER; note = 5-methyl cytidine
  modified_base 16: mod_base = OTHER; note = 5-methyl cytidine
  modified_base 18: mod_base = OTHER; note = 5-methyl cytidine
  modified_base 20: mod_base = OTHER; note = 5-methyl cytidine
tttgatattgagcttctctc

SEQ ID NO: 774 - DNA, 20 bp, synthetic construct
  source 1..20: mol_type = other DNA
  modified_base 1..20: mod_base = OTHER; note = Phosphorothioate linkage
  modified_base 1..5: mod_base = OTHER; note = 2'-O-(2-methoxyethyl) ribonucleotide
  misc_feature 1..5: note = RNA
  misc_feature 6..15: note = DNA
  misc_feature 16..20: note = RNA
  modified_base 16..20: mod_base = OTHER; note = 2'-O-(2-methoxyethyl) ribonucleotide
  modified_base 16: mod_base = OTHER; note = 5-methyl cytidine
  modified_base 18: mod_base = OTHER; note = 5-methyl cytidine
gattttgatattgagcttct

SEQ ID NO: 775 - DNA, 20 bp, synthetic construct
  source 1..20: mol_type = other DNA
  modified_base 1..20: mod_base = OTHER; note = Phosphorothioate linkage
  modified_base 1..5: mod_base = OTHER; note = 2'-O-(2-methoxyethyl) ribonucleotide
  misc_feature 1..5: note = RNA
  misc_feature 6..15: note = DNA
  misc_feature 16..20: note = RNA
  modified_base 16..20: mod_base = OTHER; note = 2'-O-(2-methoxyethyl) ribonucleotide
  modified_base 2: mod_base = OTHER; note = 5-methyl cytidine
  modified_base 19: mod_base = OTHER; note = 5-methyl cytidine
tcagattttgatattgagct

SEQ ID NO: 776 - DNA, 20 bp, synthetic construct
  source 1..20: mol_type = other DNA
  modified_base 1..20: mod_base = OTHER; note = Phosphorothioate linkage
  modified_base 1..5: mod_base = OTHER; note = 2'-O-(2-methoxyethyl) ribonucleotide
  misc_feature 1..5: note = RNA
  misc_feature 6..15: note = DNA
  misc_feature 16..20: note = RNA
  modified_base 16..20: mod_base = OTHER; note = 2'-O-(2-methoxyethyl) ribonucleotide
  modified_base 2: mod_base = OTHER; note = 5-methyl cytidine
  modified_base 11: mod_base = OTHER; note = 5-methyl cytidine
actggattttcagattttga

SEQ ID NO: 777 - DNA, 20 bp, synthetic construct
  source 1..20: mol_type = other DNA
  modified_base 1..20: mod_base = OTHER; note = Phosphorothioate linkage
  modified_base 1..5: mod_base = OTHER; note = 2'-O-(2-methoxyethyl) ribonucleotide
  misc_feature 1..5: note = RNA
  misc_feature 6..15: note = DNA
  misc_feature 16..20: note = RNA
  modified_base 16..20: mod_base = OTHER; note = 2'-O-(2-methoxyethyl) ribonucleotide
  modified_base 5: mod_base = OTHER; note = 5-methyl cytidine
  modified_base 14: mod_base = OTHER; note = 5-methyl cytidine
tagactggattttcagattt

SEQ ID NO: 778 - DNA, 20 bp, synthetic construct
  source 1..20: mol_type = other DNA
  modified_base 1..20: mod_base = OTHER; note = Phosphorothioate linkage
  modified_base 1..5: mod_base = OTHER; note = 2'-O-(2-methoxyethyl) ribonucleotide
  misc_feature 1..5: note = RNA
  misc_feature 6..15: note = DNA
  misc_feature 16..20: note = RNA
  modified_base 16..20: mod_base = OTHER; note = 2'-O-(2-methoxyethyl) ribonucleotide
  modified_base 1: mod_base = OTHER; note = 5-methyl cytidine
  modified_base 10: mod_base = OTHER; note = 5-methyl cytidine
  modified_base 19: mod_base = OTHER; note = 5-methyl cytidine
ctttttagactggattttca

SEQ ID NO: 779 - DNA, 20 bp, synthetic construct
  source 1..20: mol_type = other DNA
  modified_base 1..20: mod_base = OTHER; note = Phosphorothioate linkage
  modified_base 1..5: mod_base = OTHER; note = 2'-O-(2-methoxyethyl) ribonucleotide
  misc_feature 1..5: note = RNA
  misc_feature 6..15: note = DNA
  misc_feature 16..20: note = RNA
  modified_base 16..20: mod_base = OTHER; note = 2'-O-(2-methoxyethyl) ribonucleotide
  modified_base 2..3: mod_base = OTHER; note = 5-methyl cytidine
  modified_base 12: mod_base = OTHER; note = 5-methyl cytidine
accctttttagactggattt

SEQ ID NO: 780 - DNA, 20 bp, synthetic construct
  source 1..20: mol_type = other DNA
  modified_base 1..20: mod_base = OTHER; note = Phosphorothioate linkage
  modified_base 1..5: mod_base = OTHER; note = 2'-O-(2-methoxyethyl) ribonucleotide
  misc_feature 1..5: note = RNA
  misc_feature 6..15: note = DNA
  misc_feature 16..20: note = RNA
  modified_base 16..20: mod_base = OTHER; note = 2'-O-(2-methoxyethyl) ribonucleotide
  modified_base 5..7: mod_base = OTHER; note = 5-methyl cytidine
  modified_base 16: mod_base = OTHER; note = 5-methyl cytidine
agaaccctttttagactgga

SEQ ID NO: 781 - DNA, 20 bp, synthetic construct
  source 1..20: mol_type = other DNA
  modified_base 1..20: mod_base = OTHER; note = Phosphorothioate linkage
  modified_base 1..5: mod_base = OTHER; note = 2'-O-(2-methoxyethyl) ribonucleotide
  misc_feature 1..5: note = RNA
  misc_feature 6..15: note = DNA
  misc_feature 16..20: note = RNA
  modified_base 16..20: mod_base = OTHER; note = 2'-O-(2-methoxyethyl) ribonucleotide
  modified_base 8..10: mod_base = OTHER; note = 5-methyl cytidine
  modified_base 19: mod_base = OTHER; note = 5-methyl cytidine
tggagaaccctttttagact

SEQ ID NO: 782 - DNA, 20 bp, synthetic construct
  source 1..20: mol_type = other DNA
  modified_base 1..20: mod_base = OTHER; note = Phosphorothioate linkage
  modified_base 1..5: mod_base = OTHER; note = 2'-O-(2-methoxyethyl) ribonucleotide
  misc_feature 1..5: note = RNA
  misc_feature 6..15: note = DNA
  misc_feature 16..20: note = RNA
  modified_base 16..20: mod_base = OTHER; note = 2'-O-(2-methoxyethyl) ribonucleotide
  modified_base 11..13: mod_base = OTHER; note = 5-methyl cytidine
gtatggagaaccctttttag

SEQ ID NO: 783 - DNA, 20 bp, synthetic construct
  source 1..20: mol_type = other DNA
  modified_base 1..20: mod_base = OTHER; note = Phosphorothioate linkage
  modified_base 1..5: mod_base = OTHER; note = 2'-O-(2-methoxyethyl) ribonucleotide
  misc_feature 1..5: note = RNA
  misc_feature 6..15: note = DNA
  misc_feature 16..20: note = RNA
  modified_base 16..20: mod_base = OTHER; note = 2'-O-(2-methoxyethyl) ribonucleotide
  modified_base 6: mod_base = OTHER; note = 5-methyl cytidine
gatatctgtaggtatggaga

SEQ ID NO: 784 - DNA, 20 bp, synthetic construct
  source 1..20: mol_type = other DNA
  modified_base 1..20: mod_base = OTHER; note = Phosphorothioate linkage
  modified_base 1..5: mod_base = OTHER; note = 2'-O-(2-methoxyethyl) ribonucleotide
  misc_feature 1..5: note = RNA
  misc_feature 6..15: note = DNA
  misc_feature 16..20: note = RNA
  modified_base 16..20: mod_base = OTHER; note = 2'-O-(2-methoxyethyl) ribonucleotide
  modified_base 9: mod_base = OTHER; note = 5-methyl cytidine
taagatatctgtaggtatgg

SEQ ID NO: 785 - DNA, 20 bp, synthetic construct
  source 1..20: mol_type = other DNA
  modified_base 1..20: mod_base = OTHER; note = Phosphorothioate linkage
  modified_base 1..5: mod_base = OTHER; note = 2'-O-(2-methoxyethyl) ribonucleotide
  misc_feature 1..5: note = RNA
  misc_feature 6..15: note = DNA
  misc_feature 16..20: note = RNA
  modified_base 16..20: mod_base = OTHER; note = 2'-O-(2-methoxyethyl) ribonucleotide
  modified_base 4: mod_base = OTHER; note = 5-methyl cytidine
  modified_base 13: mod_base = OTHER; note = 5-methyl cytidine
agtctaagatatctgtaggt

SEQ ID NO: 786 - DNA, 20 bp, synthetic construct
  source 1..20: mol_type = other DNA
  modified_base 1..20: mod_base = OTHER; note = Phosphorothioate linkage
  modified_base 1: mod_base = OTHER; note = 2'-O-(2-methoxyethyl) ribonucleotide
  modified_base 2: mod_base = OTHER; note = Locked nucleic acid
  modified_base 3..5: mod_base = OTHER; note = 2'-O-(2-methoxyethyl) ribonucleotide
  misc_feature 1..5: note = RNA
  misc_feature 6..15: note = DNA
  misc_feature 16..20: note = RNA
  modified_base 16..18: mod_base = OTHER; note = 2'-O-(2-methoxyethyl) ribonucleotide
  modified_base 19: mod_base = OTHER; note = Locked nucleic acid
  modified_base 20: mod_base = OTHER; note = 2'-O-(2-methoxyethyl) ribonucleotide
  modified_base 4..5: mod_base = OTHER; note = 5-methyl cytidine
  modified_base 7: mod_base = OTHER; note = 5-methyl cytidine
  modified_base 11: mod_base = OTHER; note = 5-methyl cytidine
  modified_base 13: mod_base = OTHER; note = 5-methyl cytidine
  modified_base 15: mod_base = OTHER; note = 5-methyl cytidine
  modified_base 17: mod_base = OTHER; note = 5-methyl cytidine
ggacctctgtctctctctgg

SEQ ID NO: 787 - DNA, 20 bp, synthetic construct
  source 1..20: mol_type = other DNA
  modified_base 1..20: mod_base = OTHER; note = Phosphorothioate linkage
  modified_base 1..3: mod_base = OTHER; note = 2'-O-(2-methoxyethyl) ribonucleotide
  modified_base 4: mod_base = OTHER; note = Locked nucleic acid
  modified_base 5: mod_base = OTHER; note = 2'-O-(2-methoxyethyl) ribonucleotide
  misc_feature 1..5: note = RNA
  misc_feature 6..15: note = DNA
  misc_feature 16..20: note = RNA
  modified_base 16: mod_base = OTHER; note = 2'-O-(2-methoxyethyl) ribonucleotide
  modified_base 17: mod_base = OTHER; note = Locked nucleic acid
  modified_base 18..20: mod_base = OTHER; note = 2'-O-(2-methoxyethyl) ribonucleotide
  modified_base 4..5: mod_base = OTHER; note = 5-methyl cytidine
  modified_base 7: mod_base = OTHER; note = 5-methyl cytidine
  modified_base 11: mod_base = OTHER; note = 5-methyl cytidine
  modified_base 13: mod_base = OTHER; note = 5-methyl cytidine
  modified_base 15: mod_base = OTHER; note = 5-methyl cytidine
  modified_base 17: mod_base = OTHER; note = 5-methyl cytidine
ggacctctgtctctctctgg

SEQ ID NO: 788 - DNA, 20 bp, synthetic construct
  source 1..20: mol_type = other DNA
  modified_base 1..20: mod_base = OTHER; note = Phosphorothioate linkage
  modified_base 1: mod_base = OTHER; note = 2'-O-(2-methoxyethyl) ribonucleotide
  modified_base 2: mod_base = OTHER; note = Locked nucleic acid
  modified_base 3: mod_base = OTHER; note = 2'-O-(2-methoxyethyl) ribonucleotide
  modified_base 4: mod_base = OTHER; note = Locked nucleic acid
  modified_base 5: mod_base = OTHER; note = 2'-O-(2-methoxyethyl) ribonucleotide
  misc_feature 1..5: note = RNA
  misc_feature 6..15: note = DNA
  misc_feature 16..20: note = RNA
  modified_base 16: mod_base = OTHER; note = 2'-O-(2-methoxyethyl) ribonucleotide
  modified_base 17: mod_base = OTHER; note = Locked nucleic acid
  modified_base 18: mod_base = OTHER; note = 2'-O-(2-methoxyethyl) ribonucleotide
  modified_base 19: mod_base = OTHER; note = Locked nucleic acid
  modified_base 20: mod_base = OTHER; note = 2'-O-(2-methoxyethyl) ribonucleotide
  modified_base 4..5: mod_base = OTHER; note = 5-methyl cytidine
  modified_base 7: mod_base = OTHER; note = 5-methyl cytidine
  modified_base 11: mod_base = OTHER; note = 5-methyl cytidine
  modified_base 13: mod_base = OTHER; note = 5-methyl cytidine
  modified_base 15: mod_base = OTHER; note = 5-methyl cytidine
  modified_base 17: mod_base = OTHER; note = 5-methyl cytidine
ggacctctgtctctctctgg

SEQ ID NO: 789 - DNA, 20 bp, synthetic construct
  source 1..20: mol_type = other DNA
  modified_base 1..20: mod_base = OTHER; note = Phosphorothioate linkage
  modified_base 1: mod_base = OTHER; note = Locked nucleic acid
  modified_base 2..3: mod_base = OTHER; note = 2'-O-(2-methoxyethyl) ribonucleotide
  modified_base 4: mod_base = OTHER; note = Locked nucleic acid
  modified_base 5: mod_base = OTHER; note = 2'-O-(2-methoxyethyl) ribonucleotide
  misc_feature 1..5: note = RNA
  misc_feature 6..15: note = DNA
  misc_feature 16..20: note = RNA
  modified_base 16: mod_base = OTHER; note = 2'-O-(2-methoxyethyl) ribonucleotide
  modified_base 17: mod_base = OTHER; note = Locked nucleic acid
  modified_base 18..19: mod_base = OTHER; note = 2'-O-(2-methoxyethyl) ribonucleotide
  modified_base 20: mod_base = OTHER; note = Locked nucleic acid
  modified_base 4..5: mod_base = OTHER; note = 5-methyl cytidine
  modified_base 7: mod_base = OTHER; note = 5-methyl cytidine
  modified_base 11: mod_base = OTHER; note = 5-methyl cytidine
  modified_base 13: mod_base = OTHER; note = 5-methyl cytidine
  modified_base 15: mod_base = OTHER; note = 5-methyl cytidine
  modified_base 17: mod_base = OTHER; note = 5-methyl cytidine
ggacctctgtctctctctgg

SEQ ID NO: 790 - DNA, 20 bp, synthetic construct
  source 1..20: mol_type = other DNA
  modified_base 1..3: mod_base = OTHER; note = Phosphorothioate linkage
  modified_base 5..16: mod_base = OTHER; note = Phosphorothioate linkage
  modified_base 18..20: mod_base = OTHER; note = Phosphorothioate linkage
  modified_base 1..5: mod_base = OTHER; note = 2'-O-(2-methoxyethyl) ribonucleotide
  misc_feature 1..5: note = RNA
  misc_feature 6..15: note = DNA
  misc_feature 16..20: note = RNA
  modified_base 16..20: mod_base = OTHER; note = 2'-O-(2-methoxyethyl) ribonucleotide
  modified_base 4..5: mod_base = OTHER; note = 5-methyl cytidine
  modified_base 7: mod_base = OTHER; note = 5-methyl cytidine
  modified_base 11: mod_base = OTHER; note = 5-methyl cytidine
  modified_base 13: mod_base = OTHER; note = 5-methyl cytidine
  modified_base 15: mod_base = OTHER; note = 5-methyl cytidine
  modified_base 17: mod_base = OTHER; note = 5-methyl cytidine
ggacctctgtctctctctgg

SEQ ID NO: 791 - DNA, 20 bp, synthetic construct
  source 1..20: mol_type = other DNA
  modified_base 1..2: mod_base = OTHER; note = Phosphorothioate linkage
  modified_base 5..16: mod_base = OTHER; note = Phosphorothioate linkage
  modified_base 19..20: mod_base = OTHER; note = Phosphorothioate linkage
  modified_base 1..5: mod_base = OTHER; note = 2'-O-(2-methoxyethyl) ribonucleotide
  misc_feature 1..5: note = RNA
  misc_feature 6..15: note = DNA
  misc_feature 16..20: note = RNA
  modified_base 16..20: mod_base = OTHER; note = 2'-O-(2-methoxyethyl) ribonucleotide
  modified_base 4..5: mod_base = OTHER; note = 5-methyl cytidine
  modified_base 6: mod_base = OTHER; note = 5-methyl cytidine
  modified_base 11: mod_base = OTHER; note = 5-methyl cytidine
  modified_base 13: mod_base = OTHER; note = 5-methyl cytidine
  modified_base 15: mod_base = OTHER; note = 5-methyl cytidine
  modified_base 17: mod_base = OTHER; note = 5-methyl cytidine
ggacctctgtctctctctgg

SEQ ID NO: 792 - DNA, 20 bp, synthetic construct
  source 1..20: mol_type = other DNA
  modified_base 4..16: mod_base = OTHER; note = Phosphorothioate linkage
  modified_base 1..5: mod_base = OTHER; note = 2'-O-(2-methoxyethyl) ribonucleotide
  misc_feature 1..5: note = RNA
  misc_feature 6..15: note = DNA
  misc_feature 16..20: note = RNA
  modified_base 16..20: mod_base = OTHER; note = 2'-O-(2-methoxyethyl) ribonucleotide
  modified_base 4..5: mod_base = OTHER; note = 5-methyl cytidine
  modified_base 7: mod_base = OTHER; note = 5-methyl cytidine
  modified_base 11: mod_base = OTHER; note = 5-methyl cytidine
  modified_base 13: mod_base = OTHER; note = 5-methyl cytidine
  modified_base 15: mod_base = OTHER; note = 5-methyl cytidine
  modified_base 17: mod_base = OTHER; note = 5-methyl cytidine
ggacctctgtctctctctgg

SEQ ID NO: 793 - DNA, 20 bp, synthetic construct
  source 1..20: mol_type = other DNA
  modified_base 1..2: mod_base = OTHER; note = Phosphorothioate linkage
  modified_base 3..4: mod_base = OTHER; note = Phosphorothioate linkage
  modified_base 5..16: mod_base = OTHER; note = Phosphorothioate linkage
  modified_base 17..18: mod_base = OTHER; note = Phosphorothioate linkage
  modified_base 19..20: mod_base = OTHER; note = Phosphorothioate linkage
  modified_base 1..5: mod_base = OTHER; note = 2'-O-(2-methoxyethyl) ribonucleotide
  misc_feature 1..5: note = RNA
  misc_feature 6..15: note = DNA
  misc_feature 16..20: note = RNA
  modified_base 16..20: mod_base = OTHER; note = 2'-O-(2-methoxyethyl) ribonucleotide
  modified_base 4..5: mod_base = OTHER; note = 5-methyl cytidine
  modified_base 7: mod_base = OTHER; note = 5-methyl cytidine
  modified_base 11: mod_base = OTHER; note = 5-methyl cytidine
  modified_base 13: mod_base = OTHER; note = 5-methyl cytidine
  modified_base 15: mod_base = OTHER; note = 5-methyl cytidine
  modified_base 17: mod_base = OTHER; note = 5-methyl cytidine
ggacctctgtctctctctgg

SEQ ID NO: 794 - DNA, 20 bp, synthetic construct
  source 1..20: mol_type = other DNA
  modified_base 2..3: mod_base = OTHER; note = Phosphorothioate linkage
  modified_base 4..17: mod_base = OTHER; note = Phosphorothioate linkage
  modified_base 18..19: mod_base = OTHER; note = Phosphorothioate linkage
  modified_base 1..5: mod_base = OTHER; note = 2'-O-(2-methoxyethyl) ribonucleotide
  misc_feature 1..5: note = RNA
  misc_feature 6..15: note = DNA
  misc_feature 16..20: note = RNA
  modified_base 16..20: mod_base = OTHER; note = 2'-O-(2-methoxyethyl) ribonucleotide
  modified_base 4..5: mod_base = OTHER; note = 5-methyl cytidine
  modified_base 7: mod_base = OTHER; note = 5-methyl cytidine
  modified_base 11: mod_base = OTHER; note = 5-methyl cytidine
  modified_base 13: mod_base = OTHER; note = 5-methyl cytidine
  modified_base 15: mod_base = OTHER; note = 5-methyl cytidine
  modified_base 17: mod_base = OTHER; note = 5-methyl cytidine
ggacctctgtctctctctgg

SEQ ID NO: 795 - DNA, 20 bp, synthetic construct
  source 1..20: mol_type = other DNA
  modified_base 1..20: mod_base = OTHER; note = Phosphorothioate linkage
  modified_base 1..5: mod_base = OTHER; note = 2'-O-(2-methoxyethyl) ribonucleotide
  misc_feature 1..5: note = RNA
  misc_feature 6..7: note = DNA
  misc_feature 8: note = RNA
  modified_base 8: mod_base = OTHER; note = 2'-O-(2-methoxyethyl) ribonucleotide
  misc_feature 9..10: note = DNA
  misc_feature 16..20: note = DNA
  modified_base 11: mod_base = OTHER; note = 2'-O-(2-methoxyethyl) ribonucleotide
  misc_feature 12..13: note = DNA
  misc_feature 14: note = RNA
  modified_base 14: mod_base = OTHER; note = 2'-O-(2-methoxyethyl) ribonucleotide
  misc_feature 15: note = DNA
  misc_feature 16..20: note = RNA
  modified_base 16..20: mod_base = OTHER; note = 2'-O-(2-methoxyethyl) ribonucleotide
  modified_base 4..5: mod_base = OTHER; note = 5-methyl cytidine
  modified_base 7: mod_base = OTHER; note = 5-methyl cytidine
  modified_base 11: mod_base = OTHER; note = 5-methyl cytidine
  modified_base 13: mod_base = OTHER; note = 5-methyl cytidine
  modified_base 15: mod_base = OTHER; note = 5-methyl cytidine
  modified_base 17: mod_base = OTHER; note = 5-methyl cytidine
ggacctctgtctctctctgg

SEQ ID NO: 796 - DNA, 22 bp, synthetic construct
  source 1..22: mol_type = other DNA
  modified_base 1..20: mod_base = OTHER; note = Phosphorothioate linkage
  modified_base 1..6: mod_base = OTHER; note = 2'-O-(2-methoxyethyl) ribonucleotide
  misc_feature 1..6: note = RNA
  misc_feature 7..16: note = DNA
  misc_feature 17..22: note = RNA
  modified_base 17..22: mod_base = OTHER; note = 2'-O-(2-methoxyethyl) ribonucleotide
  modified_base 5..6: mod_base = OTHER; note = 5-methyl cytidine
  modified_base 8: mod_base = OTHER; note = 5-methyl cytidine
  modified_base 12: mod_base = OTHER; note = 5-methyl cytidine
  modified_base 14: mod_base = OTHER; note = 5-methyl cytidine
  modified_base 16: mod_base = OTHER; note = 5-methyl cytidine
  modified_base 18: mod_base = OTHER; note = 5-methyl cytidine
aggacctctgtctctctctggt

SEQ ID NO: 797 - DNA, 22 bp, synthetic construct
  source 1..22: mol_type = other DNA
  modified_base 1..20: mod_base = OTHER; note = Phosphorothioate linkage
  modified_base 1: mod_base = OTHER; note = Locked nucleic acid
  modified_base 2..3: mod_base = OTHER; note = 2'-O-(2-methoxyethyl) ribonucleotide
  modified_base 4: mod_base = OTHER; note = Locked nucleic acid
  modified_base 5..6: mod_base = OTHER; note = 2'-O-(2-methoxyethyl) ribonucleotide
  misc_feature 1..6: note = RNA
  misc_feature 7..16: note = DNA
  misc_feature 17..22: note = RNA
  modified_base 17..18: mod_base = OTHER; note = 2'-O-(2-methoxyethyl) ribonucleotide
  modified_base 19: mod_base = OTHER; note = Locked nucleic acid
  modified_base 20..21: mod_base = OTHER; note = 2'-O-(2-methoxyethyl) ribonucleotide
  modified_base 22: mod_base = OTHER; note = Locked nucleic acid
  modified_base 5..6: mod_base = OTHER; note = 5-methyl cytidine
  modified_base 8: mod_base = OTHER; note = 5-methyl cytidine
  modified_base 12: mod_base = OTHER; note = 5-methyl cytidine
  modified_base 14: mod_base = OTHER; note = 5-methyl cytidine
  modified_base 16: mod_base = OTHER; note = 5-methyl cytidine
  modified_base 18: mod_base = OTHER; note = 5-methyl cytidine
aggacctctgtctctctctggt

SEQ ID NO: 798 - DNA, 22 bp, synthetic construct
  source 1..22: mol_type = other DNA
  modified_base 1..22: mod_base = OTHER; note = Phosphorothioate linkage
  modified_base 1..2: mod_base = OTHER; note = 2'-O-(2-methoxyethyl) ribonucleotide
  modified_base 3: mod_base = OTHER; note = Locked nucleic acid
  modified_base 4: mod_base = OTHER; note = 2'-O-(2-methoxyethyl) ribonucleotide
  modified_base 5: mod_base = OTHER; note = Locked nucleic acid
  modified_base 6: mod_base = OTHER; note = 2'-O-(2-methoxyethyl) ribonucleotide
  misc_feature 1..6: note = RNA
  misc_feature 7..16: note = DNA
  misc_feature 17..22: note = RNA
  modified_base 17: mod_base = OTHER; note = 2'-O-(2-methoxyethyl) ribonucleotide
  modified_base 18: mod_base = OTHER; note = Locked nucleic acid
  modified_base 19: mod_base = OTHER; note = 2'-O-(2-methoxyethyl) ribonucleotide
  modified_base 20: mod_base = OTHER; note = Locked nucleic acid
  modified_base 21..22: mod_base = OTHER; note = 2'-O-(2-methoxyethyl) ribonucleotide
  modified_base 5..6: mod_base = OTHER; note = 5-methyl cytidine
  modified_base 8: mod_base = OTHER; note = 5-methyl cytidine
  modified_base 12: mod_base = OTHER; note = 5-methyl cytidine
  modified_base 14: mod_base = OTHER; note = 5-methyl cytidine
  modified_base 16: mod_base = OTHER; note = 5-methyl cytidine
  modified_base 18: mod_base = OTHER; note = 5-methyl cytidine
aggacctctgtctctctctggt

SEQ ID NO: 799 - DNA, 22 bp, synthetic construct
  source 1..22: mol_type = other DNA
  modified_base 2..3: mod_base = OTHER; note = Phosphorothioate linkage
  modified_base 4..5: mod_base = OTHER; note = Phosphorothioate linkage
  modified_base 6..17: mod_base = OTHER; note = Phosphorothioate linkage
  modified_base 18..19: mod_base = OTHER; note = Phosphorothioate linkage
  modified_base 20..21: mod_base = OTHER; note = Phosphorothioate linkage
  modified_base 1..6: mod_base = OTHER; note = 2'-O-(2-methoxyethyl) ribonucleotide
  misc_feature 1..6: note = RNA
  misc_feature 7..16: note = DNA
  misc_feature 17..22: note = RNA
  modified_base 17..22: mod_base = OTHER; note = 2'-O-(2-methoxyethyl) ribonucleotide
  modified_base 5..6: mod_base = OTHER; note = 5-methyl cytidine
  modified_base 8: mod_base = OTHER; note = 5-methyl cytidine
  modified_base 12: mod_base = OTHER; note = 5-methyl cytidine
  modified_base 14: mod_base = OTHER; note = 5-methyl cytidine
  modified_base 16: mod_base = OTHER; note = 5-methyl cytidine
  modified_base 18: mod_base = OTHER; note = 5-methyl cytidine
aggacctctgtctctctctggt

SEQ ID NO: 800 - DNA, 22 bp, synthetic construct
  source 1..22: mol_type = other DNA
  modified_base 1..2: mod_base = OTHER; note = Phosphorothioate linkage
  modified_base 3..4: mod_base = OTHER; note = Phosphorothioate linkage
  modified_base 5..18: mod_base = OTHER; note = Phosphorothioate linkage
  modified_base 19..20: mod_base = OTHER; note = Phosphorothioate linkage
  modified_base 21..22: mod_base = OTHER; note = Phosphorothioate linkage
  modified_base 1..6: mod_base = OTHER; note = 2'-O-(2-methoxyethyl) ribonucleotide
  misc_feature 1..6: note = RNA
  misc_feature 7..16: note = DNA
  misc_feature 17..22: note = RNA
  modified_base 17..22: mod_base = OTHER; note = 2'-O-(2-methoxyethyl) ribonucleotide
  modified_base 5..6: mod_base = OTHER; note = 5-methyl cytidine
  modified_base 8: mod_base = OTHER; note = 5-methyl cytidine
  modified_base 12: mod_base = OTHER; note = 5-methyl cytidine
  modified_base 14: mod_base = OTHER; note = 5-methyl cytidine
  modified_base 16: mod_base = OTHER; note = 5-methyl cytidine
  modified_base 18: mod_base = OTHER; note = 5-methyl cytidine
aggacctctgtctctctctggt

SEQ ID NO: 801 - DNA, 22 bp, synthetic construct
  source 1..22: mol_type = other DNA
  modified_base 1..2: mod_base = OTHER; note = Phosphorothioate linkage
  modified_base 3..5: mod_base = OTHER; note = Phosphorothioate linkage
  modified_base 6..17: mod_base = OTHER; note = Phosphorothioate linkage
  modified_base 18..20: mod_base = OTHER; note = Phosphorothioate linkage
  modified_base 21..22: mod_base = OTHER; note = Phosphorothioate linkage
  modified_base 1..6: mod_base = OTHER; note = 2'-O-(2-methoxyethyl) ribonucleotide
  misc_feature 1..6: note = RNA
  misc_feature 7..16: note = DNA
  misc_feature 17..22: note = RNA
  modified_base 17..22: mod_base = OTHER; note = 2'-O-(2-methoxyethyl) ribonucleotide
  modified_base 5..6: mod_base = OTHER; note = 5-methyl cytidine
  modified_base 8: mod_base = OTHER; note = 5-methyl cytidine
  modified_base 12: mod_base = OTHER; note = 5-methyl cytidine
  modified_base 14: mod_base = OTHER; note = 5-methyl cytidine
  modified_base 16: mod_base = OTHER; note = 5-methyl cytidine
  modified_base 18: mod_base = OTHER; note = 5-methyl cytidine
aggacctctgtctctctctggt

SEQ ID NO: 802 - DNA, 24 bp, synthetic construct
  source 1..24: mol_type = other DNA
  modified_base 1..20: mod_base = OTHER; note = Phosphorothioate linkage
  modified_base 1..6: mod_base = OTHER; note = 2'-O-(2-methoxyethyl) ribonucleotide
  misc_feature 1..6: note = RNA
  misc_feature 7..16: note = DNA
  misc_feature 17..22: note = RNA
  modified_base 17..22: mod_base = OTHER; note = 2'-O-(2-methoxyethyl) ribonucleotide
  modified_base 6..7: mod_base = OTHER; note = 5-methyl cytidine
  modified_base 9: mod_base = OTHER; note = 5-methyl cytidine
  modified_base 13: mod_base = OTHER; note = 5-methyl cytidine
  modified_base 15: mod_base = OTHER; note = 5-methyl cytidine
  modified_base 17: mod_base = OTHER; note = 5-methyl cytidine
  modified_base 19: mod_base = OTHER; note = 5-methyl cytidine
taggacctctgtctctctctggtg

SEQ ID NO: 803 - DNA, 24 bp, synthetic construct
  source 1..24: mol_type = other DNA
  modified_base 1..24: mod_base = OTHER; note = Phosphorothioate linkage
  modified_base 1: mod_base = OTHER; note = Locked nucleic acid
  modified_base 2..3: mod_base = OTHER; note = 2'-O-(2-methoxyethyl) ribonucleotide
  modified_base 4: mod_base = OTHER; note = Locked nucleic acid
  modified_base 5..7: mod_base = OTHER; note = 2'-O-(2-methoxyethyl) ribonucleotide
  misc_feature 1..7: note = RNA
  misc_feature 8..17: note = DNA
  misc_feature 18..24: note = RNA
  modified_base 18..20: mod_base = OTHER; note = 2'-O-(2-methoxyethyl) ribonucleotide
  modified_base 21: mod_base = OTHER; note = Locked nucleic acid
  modified_base 22..23: mod_base = OTHER; note = 2'-O-(2-methoxyethyl) ribonucleotide
  modified_base 24: mod_base = OTHER; note = Locked nucleic acid
  modified_base 6..7: mod_base = OTHER; note = 5-methyl cytidine
  modified_base 9: mod_base = OTHER; note = 5-methyl cytidine
  modified_base 13: mod_base = OTHER; note = 5-methyl cytidine
  modified_base 15: mod_base = OTHER; note = 5-methyl cytidine
  modified_base 17: mod_base = OTHER; note = 5-methyl cytidine
  modified_base 19: mod_base = OTHER; note = 5-methyl cytidine
taggacctctgtctctctctggtg

SEQ ID NO: 804 - DNA, 24 bp, synthetic construct
  source 1..24: mol_type = other DNA
  modified_base 1..24: mod_base = OTHER; note = Phosphorothioate linkage
  modified_base 1..2: mod_base = OTHER; note = 2'-O-(2-methoxyethyl) ribonucleotide
  modified_base 3: mod_base = OTHER; note = Locked nucleic acid
  modified_base 4..5: mod_base = OTHER; note = 2'-O-(2-methoxyethyl) ribonucleotide
  modified_base 6: mod_base = OTHER; note = Locked nucleic acid
  modified_base 7: mod_base = OTHER; note = 2'-O-(2-methoxyethyl) ribonucleotide
  misc_feature 1..7: note = RNA
  misc_feature 8..17: note = DNA
  misc_feature 18..24: note = RNA
  modified_base 18: mod_base = OTHER; note = 2'-O-(2-methoxyethyl) ribonucleotide
  modified_base 19: mod_base = OTHER; note = Locked nucleic acid
  modified_base 20..21: mod_base = OTHER; note = 2'-O-(2-methoxyethyl) ribonucleotide
  modified_base 22: mod_base = OTHER; note = Locked nucleic acid
  modified_base 23..24: mod_base = OTHER; note = 2'-O-(2-methoxyethyl) ribonucleotide
  modified_base 6..7: mod_base = OTHER; note = 5-methyl cytidine
  modified_base 9: mod_base = OTHER; note = 5-methyl cytidine
  modified_base 13: mod_base = OTHER; note = 5-methyl cytidine
  modified_base 15: mod_base = OTHER; note = 5-methyl cytidine
  modified_base 17: mod_base = OTHER; note = 5-methyl cytidine
  modified_base 19: mod_base = OTHER; note = 5-methyl cytidine
taggacctctgtctctctctggtg

SEQ ID NO: 805 - DNA, 24 bp, synthetic construct
  source 1..24: mol_type = other DNA
  modified_base 1..2: mod_base = OTHER; note = Phosphorothioate linkage
  modified_base 3..4: mod_base = OTHER; note = Phosphorothioate linkage
  modified_base 5..6: mod_base = OTHER; note = Phosphorothioate linkage
  modified_base 7..18: mod_base = OTHER; note = Phosphorothioate linkage
  modified_base 19..20: mod_base = OTHER; note = Phosphorothioate linkage
  modified_base 21..22: mod_base = OTHER; note = Phosphorothioate linkage
  modified_base 23..24: mod_base = OTHER; note = Phosphorothioate linkage
  modified_base 1..7: mod_base = OTHER; note = 2'-O-(2-methoxyethyl) ribonucleotide
  misc_feature 1..7: note = RNA
  misc_feature 8..17: note = DNA
  misc_feature 18..24: note = RNA
  modified_base 18..24: mod_base = OTHER; note = 2'-O-(2-methoxyethyl) ribonucleotide
  modified_base 6..7: mod_base = OTHER; note = 5-methyl cytidine
  modified_base 9: mod_base = OTHER; note = 5-methyl cytidine
  modified_base 13: mod_base = OTHER; note = 5-methyl cytidine
  modified_base 15: mod_base = OTHER; note = 5-methyl cytidine
  modified_base 17: mod_base = OTHER; note = 5-methyl cytidine
  modified_base 19: mod_base = OTHER; note = 5-methyl cytidine
taggacctctgtctctctctggtg

SEQ ID NO: 806 - DNA, 24 bp, synthetic construct
  source 1..24: mol_type = other DNA
  modified_base 2..3: mod_base = OTHER; note = Phosphorothioate linkage
  modified_base 4..5: mod_base = OTHER; note = Phosphorothioate linkage
  modified_base 6..19: mod_base = OTHER; note = Phosphorothioate linkage
  modified_base 20..21: mod_base = OTHER; note = Phosphorothioate linkage
  modified_base 22..23: mod_base = OTHER; note = Phosphorothioate linkage
  modified_base 1..7: mod_base = OTHER; note = 2'-O-(2-methoxyethyl) ribonucleotide
  misc_feature 1..7: note = RNA
  misc_feature 8..17: note = DNA
  misc_feature 18..24: note = RNA
  modified_base 18..24: mod_base = OTHER; note = 2'-O-(2-methoxyethyl) ribonucleotide
  modified_base 6..7: mod_base = OTHER; note = 5-methyl cytidine
  modified_base 9: mod_base = OTHER; note = 5-methyl cytidine
  modified_base 13: mod_base = OTHER; note = 5-methyl cytidine
  modified_base 15: mod_base = OTHER; note = 5-methyl cytidine
  modified_base 16: mod_base = OTHER; note = 5-methyl cytidine
  modified_base 19: mod_base = OTHER; note = 5-methyl cytidine
taggacctctgtctctctctggtg

SEQ ID NO: 807 - DNA, 24 bp, synthetic construct
  source 1..24: mol_type = other DNA
  modified_base 1..2: mod_base = OTHER; note = Phosphorothioate linkage
  modified_base 3..4: mod_base = OTHER; note = Phosphorothioate linkage
  modified_base 5..20: mod_base = OTHER; note = Phosphorothioate linkage
  modified_base 21..22: mod_base = OTHER; note = Phosphorothioate linkage
  modified_base 23..24: mod_base = OTHER; note = Phosphorothioate linkage
  modified_base 1..7: mod_base = OTHER; note = 2'-O-(2-methoxyethyl) ribonucleotide
  misc_feature 1..7: note = RNA
  misc_feature 8..17: note = DNA
  misc_feature 18..24: note = RNA
  modified_base 18..24: mod_base = OTHER; note = 2'-O-(2-methoxyethyl) ribonucleotide
  modified_base 6..7: mod_base = OTHER; note = 5-methyl cytidine
  modified_base 9: mod_base = OTHER; note = 5-methyl cytidine
  modified_base 13: mod_base = OTHER; note = 5-methyl cytidine
  modified_base 15: mod_base = OTHER; note = 5-methyl cytidine
  modified_base 17: mod_base = OTHER; note = 5-methyl cytidine
  modified_base 19: mod_base = OTHER; note = 5-methyl cytidine
taggacctctgtctctctctggtg

SEQ ID NO: 808 - DNA, 20 bp, synthetic construct
  source 1..20: mol_type = other DNA
  modified_base 1..20: mod_base = OTHER; note = Phosphorothioate linkage
  modified_base 1: mod_base = OTHER; note = 2'-O-(2-methoxyethyl) ribonucleotide
  modified_base 2: mod_base = OTHER; note = Locked nucleic acid
  modified_base 3..5: mod_base = OTHER; note = 2'-O-(2-methoxyethyl) ribonucleotide
  misc_feature 1..5: note = RNA
  misc_feature 6..15: note = DNA
  misc_feature 16..20: note = RNA
  modified_base 16..18: mod_base = OTHER; note = 2'-O-(2-methoxyethyl) ribonucleotide
  modified_base 19: mod_base = OTHER; note = Locked nucleic acid
  modified_base 20: mod_base = OTHER; note = 2'-O-(2-methoxyethyl) ribonucleotide
  modified_base 3..5: mod_base = OTHER; note = 5-methyl cytidine
  modified_base 11: mod_base = OTHER; note = 5-methyl cytidine
  modified_base 13: mod_base = OTHER; note = 5-methyl cytidine
  modified_base 20: mod_base = OTHER; note = 5-methyl cytidine
ggccctgtgtctcaaattac

SEQ ID NO: 809 - DNA, 20 bp, synthetic construct
  source 1..20: mol_type = other DNA
  modified_base 1..20: mod_base = OTHER; note = Phosphorothioate linkage
  modified_base 1..3: mod_base = OTHER; note = 2'-O-(2-methoxyethyl) ribonucleotide
  modified_base 4: mod_base = OTHER; note = Locked nucleic acid
  modified_base 5: mod_base = OTHER; note = 2'-O-(2-methoxyethyl) ribonucleotide
  misc_feature 1..5: note = RNA
  misc_feature 6..15: note = DNA
  misc_feature 16..20: note = RNA
  modified_base 16: mod_base = OTHER; note = 2'-O-(2-methoxyethyl) ribonucleotide
  modified_base 17: mod_base = OTHER; note = Locked nucleic acid
  modified_base 18..20: mod_base = OTHER; note = 2'-O-(2-methoxyethyl) ribonucleotide
  modified_base 3..5: mod_base = OTHER; note = 5-methyl cytidine
  modified_base 11: mod_base = OTHER; note = 5-methyl cytidine
  modified_base 13: mod_base = OTHER; note = 5-methyl cytidine
  modified_base 20: mod_base = OTHER; note = 5-methyl cytidine
ggccctgtgtctcaaattac

SEQ ID NO: 810 - DNA, 20 bp, synthetic construct
  source 1..20: mol_type = other DNA
  modified_base 1..20: mod_base = OTHER; note = Phosphorothioate linkage
  modified_base 1: mod_base = OTHER; note = 2'-O-(2-methoxyethyl) ribonucleotide
  modified_base 2: mod_base = OTHER; note = Locked nucleic acid
  modified_base 3: mod_base = OTHER; note = 2'-O-(2-methoxyethyl) ribonucleotide
  modified_base 4: mod_base = OTHER; note = Locked nucleic acid
  modified_base 5: mod_base = OTHER; note = 2'-O-(2-methoxyethyl) ribonucleotide
  misc_feature 1..5: note = RNA
  misc_feature 6..15: note = DNA
  misc_feature 16..20: note = RNA
  modified_base 16: mod_base = OTHER; note = 2'-O-(2-methoxyethyl) ribonucleotide
  modified_base 17: mod_base = OTHER; note = Locked nucleic acid
  modified_base 18: mod_base = OTHER; note = 2'-O-(2-methoxyethyl) ribonucleotide
  modified_base 19: mod_base = OTHER; note = Locked nucleic acid
  modified_base 20: mod_base = OTHER; note = 2'-O-(2-methoxyethyl) ribonucleotide
  modified_base 3..5: mod_base = OTHER; note = 5-methyl cytidine
  modified_base 11: mod_base = OTHER; note = 5-methyl cytidine
  modified_base 13: mod_base = OTHER; note = 5-methyl cytidine
  modified_base 20: mod_base = OTHER; note = 5-methyl cytidine
ggccctgtgtctcaaattac

SEQ ID NO: 811 - DNA, 20 bp, synthetic construct
  source 1..20: mol_type = other DNA
  modified_base 1..20: mod_base = OTHER; note = Phosphorothioate linkage
  modified_base 1: mod_base = OTHER; note = Locked nucleic acid
  modified_base 2..3: mod_base = OTHER; note = 2'-O-(2-methoxyethyl) ribonucleotide
  modified_base 4: mod_base = OTHER; note = Locked nucleic acid
  modified_base 5: mod_base = OTHER; note = 2'-O-(2-methoxyethyl) ribonucleotide
  misc_feature 1..5: note = RNA
  misc_feature 6..15: note = DNA
  misc_feature 16..20: note = RNA
  modified_base 16: mod_base = OTHER; note = 2'-O-(2-methoxyethyl) ribonucleotide
  modified_base 17: mod_base = OTHER; note = Locked nucleic acid
  modified_base 18..19: mod_base = OTHER; note = 2'-O-(2-methoxyethyl) ribonucleotide
  modified_base 20: mod_base = OTHER; note = Locked nucleic acid
  modified_base 3..5: mod_base = OTHER; note = 5-methyl cytidine
  modified_base 11: mod_base = OTHER; note = 5-methyl cytidine
  modified_base 13: mod_base = OTHER; note = 5-methyl cytidine
  modified_base 20: mod_base = OTHER; note = 5-methyl cytidine
ggccctgtgtctcaaattac

SEQ ID NO: 812 - DNA, 20 bp, synthetic construct
  source 1..20: mol_type = other DNA
  modified_base 1..3: mod_base = OTHER; note = Phosphorothioate linkage
  modified_base 5..16: mod_base = OTHER; note = Phosphorothioate linkage
  modified_base 18..20: mod_base = OTHER; note = Phosphorothioate linkage
  modified_base 1..5: mod_base = OTHER; note = 2'-O-(2-methoxyethyl) ribonucleotide
  misc_feature 1..5: note = RNA
  misc_feature 6..15: note = DNA
  misc_feature 16..20: note = RNA
  modified_base 16..20: mod_base = OTHER; note = 2'-O-(2-methoxyethyl) ribonucleotide
  modified_base 3..5: mod_base = OTHER; note = 5-methyl cytidine
  modified_base 11: mod_base = OTHER; note = 5-methyl cytidine
  modified_base 13: mod_base = OTHER; note = 5-methyl cytidine
  modified_base 20: mod_base = OTHER; note = 5-methyl cytidine
ggccctgtgtctcaaattac

SEQ ID NO: 813 - DNA, 20 bp, synthetic construct
  source 1..20: mol_type = other DNA
  modified_base 1..2: mod_base = OTHER; note = Phosphorothioate linkage
  modified_base 5..16: mod_base = OTHER; note = Phosphorothioate linkage
  modified_base 19..20: mod_base = OTHER; note = Phosphorothioate linkage
  modified_base 1..5: mod_base = OTHER; note = 2'-O-(2-methoxyethyl) ribonucleotide
  misc_feature 1..5: note = RNA
  misc_feature 6..15: note = DNA
  misc_feature 16..20: note = RNA
  modified_base 16..20: mod_base = OTHER; note = 2'-O-(2-methoxyethyl) ribonucleotide
  modified_base 3..5: mod_base = OTHER; note = 5-methyl cytidine
  modified_base 11: mod_base = OTHER; note = 5-methyl cytidine
  modified_base 13: mod_base = OTHER; note = 5-methyl cytidine
  modified_base 20: mod_base = OTHER; note = 5-methyl cytidine
ggccctgtgtctcaaattac

SEQ ID NO: 814 - DNA, 20 bp, synthetic construct
  source 1..20: mol_type = other DNA
  modified_base 5..16: mod_base = OTHER; note = Phosphorothioate linkage
  modified_base 1..5: mod_base = OTHER; note = 2'-O-(2-methoxyethyl) ribonucleotide
  misc_feature 1..5: note = RNA
  misc_feature 6..15: note = DNA
  misc_feature 16..20: note = RNA
  modified_base 16..20: mod_base = OTHER; note = 2'-O-(2-methoxyethyl) ribonucleotide
  modified_base 3..5: mod_base = OTHER; note = 5-methyl cytidine
  modified_base 11: mod_base = OTHER; note = 5-methyl cytidine
  modified_base 13: mod_base = OTHER; note = 5-methyl cytidine
  modified_base 20: mod_base = OTHER; note = 5-methyl cytidine
ggccctgtgtctcaaattac

SEQ ID NO: 815 - DNA, 20 bp, synthetic construct
  source 1..20: mol_type = other DNA
  modified_base 1..2: mod_base = OTHER; note = Phosphorothioate linkage
  modified_base 3..4: mod_base = OTHER; note = Phosphorothioate linkage
  modified_base 5..16: mod_base = OTHER; note = Phosphorothioate linkage
  modified_base 17..18: mod_base = OTHER; note = Phosphorothioate linkage
  modified_base 19..20: mod_base = OTHER; note = Phosphorothioate linkage
  modified_base 1..5: mod_base = OTHER; note = 2'-O-(2-methoxyethyl) ribonucleotide
  misc_feature 1..5: note = RNA
  misc_feature 6..15: note = DNA
  misc_feature 16..20: note = RNA
  modified_base 16..20: mod_base = OTHER; note = 2'-O-(2-methoxyethyl) ribonucleotide
  modified_base 3..5: mod_base = OTHER; note = 5-methyl cytidine
  modified_base 11: mod_base = OTHER; note = 5-methyl cytidine
  modified_base 13: mod_base = OTHER; note = 5-methyl cytidine
  modified_base 20: mod_base = OTHER; note = 5-methyl cytidine
ggccctgtgtctcaaattac

SEQ ID NO: 816 - DNA, 20 bp, synthetic construct
  source 1..20: mol_type = other DNA
  modified_base 2..3: mod_base = OTHER; note = Phosphorothioate linkage
  modified_base 4..17: mod_base = OTHER; note = Phosphorothioate linkage
  modified_base 18..19: mod_base = OTHER; note = Phosphorothioate linkage
  modified_base 1..5: mod_base = OTHER; note = 2'-O-(2-methoxyethyl) ribonucleotide
  misc_feature 1..5: note = RNA
  misc_feature 6..15: note = DNA
  misc_feature 16..20: note = RNA
  modified_base 16..20: mod_base = OTHER; note = 2'-O-(2-methoxyethyl) ribonucleotide
  modified_base 3..5: mod_base = OTHER; note = 5-methyl cytidine
  modified_base 11: mod_base = OTHER; note = 5-methyl cytidine
  modified_base 13: mod_base = OTHER; note = 5-methyl cytidine
  modified_base 20: mod_base = OTHER; note = 5-methyl cytidine
ggccctgtgtctcaaattac

SEQ ID NO: 817 - DNA, 20 bp, synthetic construct
  source 1..20: mol_type = other DNA
  modified_base 1..20: mod_base = OTHER; note = Phosphorothioate linkage
  modified_base 1..5: mod_base = OTHER; note = 2'-O-(2-methoxyethyl) ribonucleotide
  misc_feature 1..5: note = RNA
  misc_feature 6..7: note = DNA
  misc_feature 8: note = RNA
  modified_base 8: mod_base = OTHER; note = 2'-O-(2-methoxyethyl) ribonucleotide
  misc_feature 9..10: note = DNA
  misc_feature 11: note = RNA
  modified_base 11: mod_base = OTHER; note = 2'-O-(2-methoxyethyl) ribonucleotide
  misc_feature 12..13: note = DNA
  misc_feature 14: note = RNA
  modified_base 14: mod_base = OTHER; note = 2'-O-(2-methoxyethyl) ribonucleotide
  misc_feature 15: note = DNA
  misc_feature 16..20: note = RNA
  modified_base 16..20: mod_base = OTHER; note = 2'-O-(2-methoxyethyl) ribonucleotide
  modified_base 3..5: mod_base = OTHER; note = 5-methyl cytidine
  modified_base 11: mod_base = OTHER; note = 5-methyl cytidine
  modified_base 13: mod_base = OTHER; note = 5-methyl cytidine
  modified_base 20: mod_base = OTHER; note = 5-methyl cytidine
ggccctgtgtctcaaattac

SEQ ID NO: 818 - DNA, 22 bp, synthetic construct
  source 1..22: mol_type = other DNA
  modified_base 1..22: mod_base = OTHER; note = Phosphorothioate linkage
  modified_base 1..6: mod_base = OTHER; note = 2'-O-(2-methoxyethyl) ribonucleotide
  misc_feature 1..6: note = RNA
  misc_feature 7..16: note = DNA
  misc_feature 17..22: note = RNA
  modified_base 17..22: mod_base = OTHER; note = 2'-O-(2-methoxyethyl) ribonucleotide
  modified_base 4..6: mod_base = OTHER; note = 5-methyl cytidine
  modified_base 12: mod_base = OTHER; note = 5-methyl cytidine
  modified_base 14: mod_base = OTHER; note = 5-methyl cytidine
  modified_base 21..22: mod_base = OTHER; note = 5-methyl cytidine
tggccctgtgtctcaaattacc

SEQ ID NO: 819 - DNA, 22 bp, synthetic construct
  source 1..22: mol_type = other DNA
  modified_base 1..22: mod_base = OTHER; note = Phosphorothioate linkage
  modified_base 1: mod_base = OTHER; note = Locked nucleic acid
  modified_base 2..3: mod_base = OTHER; note = 2'-O-(2-methoxyethyl) ribonucleotide
  modified_base 4: mod_base = OTHER; note = Locked nucleic acid
  modified_base 5..6: mod_base = OTHER; note = 2'-O-(2-methoxyethyl) ribonucleotide
  misc_feature 1..6: note = RNA
  misc_feature 7..16: note = DNA
  misc_feature 17..22: note = RNA
  modified_base 17..18: mod_base = OTHER; note = 2'-O-(2-methoxyethyl) ribonucleotide
  modified_base 19: mod_base = OTHER; note = Locked nucleic acid
  modified_base 20..21: mod_base = OTHER; note = 2'-O-(2-methoxyethyl) ribonucleotide
  modified_base 22: mod_base = OTHER; note = Locked nucleic acid
  modified_base 4..6: mod_base = OTHER; note = 5-methyl cytidine
  modified_base 12: mod_base = OTHER; note = 5-methyl cytidine
  modified_base 14: mod_base = OTHER; note = 5-methyl cytidine
  modified_base 21..22: mod_base = OTHER; note = 5-methyl cytidine
tggccctgtgtctcaaattacc

SEQ ID NO: 820 - DNA, 22 bp, synthetic construct
  source 1..22: mol_type = other DNA
  modified_base 1..22: mod_base = OTHER; note = Phosphorothioate linkage
  modified_base 1..2: mod_base = OTHER; note = 2'-O-(2-methoxyethyl) ribonucleotide
  modified_base 3: mod_base = OTHER; note = Locked nucleic acid
  modified_base 4: mod_base = OTHER; note = 2'-O-(2-methoxyethyl) ribonucleotide
  modified_base 5: mod_base = OTHER; note = Locked nucleic acid
  modified_base 6: mod_base = OTHER; note = 2'-O-(2-methoxyethyl) ribonucleotide
  misc_feature 1..6: note = RNA
  misc_feature 7..16: note = DNA
  misc_feature 17..22: note = RNA
  modified_base 17: mod_base = OTHER; note = 2'-O-(2-methoxyethyl) ribonucleotide
  modified_base 18: mod_base = OTHER; note = Locked nucleic acid
  modified_base 19: mod_base = OTHER; note = 2'-O-(2-methoxyethyl) ribonucleotide
  modified_base 20: mod_base = OTHER; note = Locked nucleic acid
  modified_base 21..22: mod_base = OTHER; note = 2'-O-(2-methoxyethyl) ribonucleotide
  modified_base 4..6: mod_base = OTHER; note = 5-methyl cytidine
  modified_base 12: mod_base = OTHER; note = 5-methyl cytidine
  modified_base 14: mod_base = OTHER; note = 5-methyl cytidine
  modified_base 21..22: mod_base = OTHER; note = 5-methyl cytidine
tggccctgtgtctcaaattacc

SEQ ID NO: 821 - DNA, 22 bp, synthetic construct
  source 1..22: mol_type = other DNA
  modified_base 2..3: mod_base = OTHER; note = Phosphorothioate linkage
  modified_base 4..5: mod_base = OTHER; note = Phosphorothioate linkage
  modified_base 6..17: mod_base = OTHER; note = Phosphorothioate linkage
  modified_base 18..19: mod_base = OTHER; note = Phosphorothioate linkage
  modified_base 20..21: mod_base = OTHER; note = Phosphorothioate linkage
  modified_base 1..6: mod_base = OTHER; note = 2'-O-(2-methoxyethyl) ribonucleotide
  misc_feature 1..6: note = RNA
  misc_feature 7..16: note = DNA
  misc_feature 17..22: note = RNA
  modified_base 17..22: mod_base = OTHER; note = 2'-O-(2-methoxyethyl) ribonucleotide
  modified_base 4..6: mod_base = OTHER; note = 5-methyl cytidine
  modified_base 12: mod_base = OTHER; note = 5-methyl cytidine
  modified_base 14: mod_base = OTHER; note = 5-methyl cytidine
  modified_base 21..22: mod_base = OTHER; note = 5-methyl cytidine
tggccctgtgtctcaaattacc

SEQ ID NO: 822 - DNA, 22 bp, synthetic construct
  source 1..22: mol_type = other DNA
  modified_base 1..2: mod_base = OTHER; note = Phosphorothioate linkage
  modified_base 3..4: mod_base = OTHER; note = Phosphorothioate linkage
  modified_base 5..18: mod_base = OTHER; note = Phosphorothioate linkage
  modified_base 19..20: mod_base = OTHER; note = Phosphorothioate linkage
  modified_base 21..22: mod_base = OTHER; note = Phosphorothioate linkage
  modified_base 1..6: mod_base = OTHER; note = 2'-O-(2-methoxyethyl) ribonucleotide
  misc_feature 1..6: note = RNA
  misc_feature 7..16: note = DNA
  misc_feature 17..22: note = RNA
  modified_base 17..22: mod_base = OTHER; note = 2'-O-(2-methoxyethyl) ribonucleotide
  modified_base 4..6: mod_base = OTHER; note = 5-methyl cytidine
  modified_base 12: mod_base = OTHER; note = 5-methyl cytidine
  modified_base 14: mod_base = OTHER; note = 5-methyl cytidine
  modified_base 21..22: mod_base = OTHER; note = 5-methyl cytidine
tggccctgtgtctcaaattacc

SEQ ID NO: 823 - DNA, 22 bp, synthetic construct
  source 1..22: mol_type = other DNA
  modified_base 1..2: mod_base = OTHER; note = Phosphorothioate linkage
  modified_base 3..5: mod_base = OTHER; note = Phosphorothioate linkage
  modified_base 6..17: mod_base = OTHER; note = Phosphorothioate linkage
  modified_base 18..20: mod_base = OTHER; note = Phosphorothioate linkage
  modified_base 21..22: mod_base = OTHER; note = Phosphorothioate linkage
  modified_base 1..6: mod_base = OTHER; note = 2'-O-(2-methoxyethyl) ribonucleotide
  misc_feature 1..6: note = RNA
  misc_feature 7..16: note = DNA
  misc_feature 17..22: note = RNA
  modified_base 17..22: mod_base = OTHER; note = 2'-O-(2-methoxyethyl) ribonucleotide
  modified_base 4..6: mod_base = OTHER; note = 5-methyl cytidine
  modified_base 12: mod_base = OTHER; note = 5-methyl cytidine
  modified_base 14: mod_base = OTHER; note = 5-methyl cytidine
  modified_base 21..22: mod_base = OTHER; note = 5-methyl cytidine
tggccctgtgtctcaaattacc

SEQ ID NO: 824 - DNA, 24 bp, synthetic construct
  source 1..24: mol_type = other DNA
  modified_base 1..24: mod_base = OTHER; note = Phosphorothioate linkage
  modified_base 1..7: mod_base = OTHER; note = 2'-O-(2-methoxyethyl) ribonucleotide
  misc_feature 1..7: note = RNA
  misc_feature 8..17: note = DNA
  misc_feature 18..24: note = RNA
  modified_base 18..24: mod_base = OTHER; note = 2'-O-(2-methoxyethyl) ribonucleotide
  modified_base 5..7: mod_base = OTHER; note = 5-methyl cytidine
  modified_base 13: mod_base = OTHER; note = 5-methyl cytidine
  modified_base 15: mod_base = OTHER; note = 5-methyl cytidine
  modified_base 22..24: mod_base = OTHER; note = 5-methyl cytidine
ttggccctgtgtctcaaattaccc

SEQ ID NO: 825 - DNA, 24 bp, synthetic construct
  source 1..24: mol_type = other DNA
  modified_base 1..24: mod_base = OTHER; note = Phosphorothioate linkage
  modified_base 1: mod_base = OTHER; note = Locked nucleic acid
  modified_base 2..3: mod_base = OTHER; note = 2'-O-(2-methoxyethyl) ribonucleotide
  modified_base 4: mod_base = OTHER; note = Locked nucleic acid
  modified_base 5..7: mod_base = OTHER; note = 2'-O-(2-methoxyethyl) ribonucleotide
  misc_feature 1..7: note = RNA
  misc_feature 8..17: note = DNA
  misc_feature 18..24: note = RNA
  modified_base 18..20: mod_base = OTHER; note = 2'-O-(2-methoxyethyl) ribonucleotide
  modified_base 21: mod_base = OTHER; note = Locked nucleic acid
  modified_base 22..23: mod_base = OTHER; note = 2'-O-(2-methoxyethyl) ribonucleotide
  modified_base 24: mod_base = OTHER; note = Locked nucleic acid
  modified_base 5..7: mod_base = OTHER; note = 5-methyl cytidine
  modified_base 13: mod_base = OTHER; note = 5-methyl cytidine
  modified_base 15: mod_base = OTHER; note = 5-methyl cytidine
  modified_base 22..24: mod_base = OTHER; note = 5-methyl cytidine
ttggccctgtgtctcaaattaccc

SEQ ID NO: 826 - DNA, 24 bp, synthetic construct
  source 1..24: mol_type = other DNA
  modified_base 1..24: mod_base = OTHER; note = Phosphorothioate linkage
  modified_base 1..2: mod_base = OTHER; note = 2'-O-(2-methoxyethyl) ribonucleotide
  modified_base 3: mod_base = OTHER; note = Locked nucleic acid
  modified_base 4..5: mod_base = OTHER; note = 2'-O-(2-methoxyethyl) ribonucleotide
  modified_base 6: mod_base = OTHER; note = Locked nucleic acid
  modified_base 7: mod_base = OTHER; note = 2'-O-(2-methoxyethyl) ribonucleotide
  misc_feature 1..7: note = RNA
  misc_feature 8..17: note = DNA
  misc_feature 18..24: note = RNA
  modified_base 18: mod_base = OTHER; note = 2'-O-(2-methoxyethyl) ribonucleotide
  modified_base 19: mod_base = OTHER; note = Locked nucleic acid
  modified_base 20..21: mod_base = OTHER; note = 2'-O-(2-methoxyethyl) ribonucleotide
  modified_base 22: mod_base = OTHER; note = Locked nucleic acid
  modified_base 23..24: mod_base = OTHER; note = 2'-O-(2-methoxyethyl) ribonucleotide
  modified_base 5..7: mod_base = OTHER; note = 5-methyl cytidine
  modified_base 13: mod_base = OTHER; note = 5-methyl cytidine
  modified_base 15: mod_base = OTHER; note = 5-methyl cytidine
  modified_base 22..24: mod_base = OTHER; note = 5-methyl cytidine
ttggccctgtgtctcaaattaccc

SEQ ID NO: 827 - DNA, 24 bp, synthetic construct
  source 1..24: mol_type = other DNA
  modified_base 1..2: mod_base = OTHER; note = Phosphorothioate linkage
  modified_base 3..4: mod_base = OTHER; note = Phosphorothioate linkage
  modified_base 5..6: mod_base = OTHER; note = Phosphorothioate linkage
  modified_base 7..18: mod_base = OTHER; note = Phosphorothioate linkage
  modified_base 19..20: mod_base = OTHER; note = Phosphorothioate linkage
  modified_base 21..22: mod_base = OTHER; note = Phosphorothioate linkage
  modified_base 23..24: mod_base = OTHER; note = Phosphorothioate linkage
  modified_base 1..7: mod_base = OTHER; note = 2'-O-(2-methoxyethyl) ribonucleotide
  misc_feature 1..7: note = RNA
  misc_feature 8..17: note = DNA
  misc_feature 18..24: note = RNA
  modified_base 18..24: mod_base = OTHER; note = 2'-O-(2-methoxyethyl) ribonucleotide
  modified_base 5..7: mod_base = OTHER; note = 5-methyl cytidine
  modified_base 13: mod_base = OTHER; note = 5-methyl cytidine
  modified_base 15: mod_base = OTHER; note = 5-methyl cytidine
  modified_base 22..24: mod_base = OTHER; note = 5-methyl cytidine
ttggccctgtgtctcaaattaccc

SEQ ID NO: 828 - DNA, 24 bp, synthetic construct
  source 1..24: mol_type = other DNA
  modified_base 2..3: mod_base = OTHER; note = Phosphorothioate linkage
  modified_base 4..5: mod_base = OTHER; note = Phosphorothioate linkage
  modified_base 6..19: mod_base = OTHER; note = Phosphorothioate linkage
  modified_base 20..21: mod_base = OTHER; note = Phosphorothioate linkage
  modified_base 22..23: mod_base = OTHER; note = Phosphorothioate linkage
  modified_base 1..7: mod_base = OTHER; note = 2'-O-(2-methoxyethyl) ribonucleotide
  misc_feature 1..7: note = RNA
  misc_feature 8..17: note = DNA
  misc_feature 18..24: note = RNA
  modified_base 18..24: mod_base = OTHER; note = 2'-O-(2-methoxyethyl) ribonucleotide
  modified_base 5..7: mod_base = OTHER; note = 5-methyl cytidine
  modified_base 13: mod_base = OTHER; note = 5-methyl cytidine
  modified_base 15: mod_base = OTHER; note = 5-methyl cytidine
  modified_base 22..24: mod_base = OTHER; note = 5-methyl cytidine
ttggccctgtgtctcaaattaccc

SEQ ID NO: 829 - DNA, 24 bp, synthetic construct
  source 1..24: mol_type = other DNA
  modified_base 1..2: mod_base = OTHER; note = Phosphorothioate linkage
  modified_base 3..4: mod_base = OTHER; note = Phosphorothioate linkage
  modified_base 5..20: mod_base = OTHER; note = Phosphorothioate linkage
  modified_base 21..22: mod_base = OTHER; note = Phosphorothioate linkage
  modified_base 23..24: mod_base = OTHER; note = Phosphorothioate linkage
  modified_base 1..7: mod_base = OTHER; note = 2'-O-(2-methoxyethyl) ribonucleotide
  misc_feature 1..7: note = RNA
  misc_feature 8..17: note = DNA
  misc_feature 18..24: note = RNA
  modified_base 18..24: mod_base = OTHER; note = 2'-O-(2-methoxyethyl) ribonucleotide
  modified_base 5..7: mod_base = OTHER; note = 5-methyl cytidine
  modified_base 13: mod_base = OTHER; note = 5-methyl cytidine
  modified_base 15: mod_base = OTHER; note = 5-methyl cytidine
  modified_base 22..24: mod_base = OTHER; note = 5-methyl cytidine
ttggccctgtgtctcaaattaccc

SEQ ID NO: 830 - DNA, 20 bp, synthetic construct
  source 1..20: mol_type = other DNA
  modified_base 1..20: mod_base = OTHER; note = Phosphorothioate linkage
  modified_base 1: mod_base = OTHER; note = 2'-O-(2-methoxyethyl) ribonucleotide
  modified_base 2: mod_base = OTHER; note = Locked nucleic acid
  modified_base 3..5: mod_base = OTHER; note = 2'-O-(2-methoxyethyl) ribonucleotide
  misc_feature 1..5: note = RNA
  misc_feature 6..15: note = DNA
  misc_feature 16..20: note = RNA
  modified_base 16..18: mod_base = OTHER; note = 2'-O-(2-methoxyethyl) ribonucleotide
  modified_base 19: mod_base = OTHER; note = Locked nucleic acid
  modified_base 20: mod_base = OTHER; note = 2'-O-(2-methoxyethyl) ribonucleotide
  modified_base 1: mod_base = OTHER; note = 5-methyl cytidine
  modified_base 17..19: mod_base = OTHER; note = 5-methyl cytidine
ctgtaggtatggagaaccct

SEQ ID NO: 831 - DNA, 20 bp, synthetic construct
  source 1..20: mol_type = other DNA
  modified_base 1..20: mod_base = OTHER; note = Phosphorothioate linkage
  modified_base 1..3: mod_base = OTHER; note = 2'-O-(2-methoxyethyl) ribonucleotide
  modified_base 4: mod_base = OTHER; note = Locked nucleic acid
  modified_base 5: mod_base = OTHER; note = 2'-O-(2-methoxyethyl) ribonucleotide
  misc_feature 1..5: note = RNA
  misc_feature 6..15: note = DNA
  misc_feature 16..20: note = RNA
  modified_base 16: mod_base = OTHER; note = 2'-O-(2-methoxyethyl) ribonucleotide
  modified_base 17: mod_base = OTHER; note = Locked nucleic acid
  modified_base 18..20: mod_base = OTHER; note = 2'-O-(2-methoxyethyl) ribonucleotide
  modified_base 1: mod_base = OTHER; note = 5-methyl cytidine
  modified_base 17..19: mod_base = OTHER; note = 5-methyl cytidine
ctgtaggtatggagaaccct

SEQ ID NO: 832 - DNA, 20 bp, synthetic construct
  source 1..20: mol_type = other DNA
  modified_base 1..20: mod_base = OTHER; note = Phosphorothioate linkage
  modified_base 1: mod_base = OTHER; note = 2'-O-(2-methoxyethyl) ribonucleotide
  modified_base 2: mod_base = OTHER; note = Locked nucleic acid
  modified_base 3: mod_base = OTHER; note = 2'-O-(2-methoxyethyl) ribonucleotide
  modified_base 4: mod_base = OTHER; note = Locked nucleic acid
  modified_base 5: mod_base = OTHER; note = 2'-O-(2-methoxyethyl) ribonucleotide
  misc_feature 1..5: note = RNA
  misc_feature 6..15: note = DNA
  misc_feature 16..20: note = RNA
  modified_base 16: mod_base = OTHER; note = 2'-O-(2-methoxyethyl) ribonucleotide
  modified_base 17: mod_base = OTHER; note = Locked nucleic acid
  modified_base 18: mod_base = OTHER; note = 2'-O-(2-methoxyethyl) ribonucleotide
  modified_base 19: mod_base = OTHER; note = Locked nucleic acid
  modified_base 20: mod_base = OTHER; note = 2'-O-(2-methoxyethyl) ribonucleotide
  modified_base 1: mod_base = OTHER; note = 5-methyl cytidine
  modified_base 17..19: mod_base = OTHER; note = 5-methyl cytidine
ctgtaggtatggagaaccct

SEQ ID NO: 833 - DNA, 20 bp, synthetic construct
  source 1..20: mol_type = other DNA
  modified_base 1..20: mod_base = OTHER; note = Phosphorothioate linkage
  modified_base 1: mod_base = OTHER; note = Locked nucleic acid
  modified_base 2..3: mod_base = OTHER; note = 2'-O-(2-methoxyethyl) ribonucleotide
  modified_base 4: mod_base = OTHER; note = Locked nucleic acid
  modified_base 5: mod_base = OTHER; note = 2'-O-(2-methoxyethyl) ribonucleotide
  misc_feature 1..5: note = RNA
  misc_feature 6..15: note = DNA
  misc_feature 16..20: note = RNA
  modified_base 16: mod_base = OTHER; note = 2'-O-(2-methoxyethyl) ribonucleotide
  modified_base 17: mod_base = OTHER; note = Locked nucleic acid
  modified_base 18..19: mod_base = OTHER; note = 2'-O-(2-methoxyethyl) ribonucleotide
  modified_base 20: mod_base = OTHER; note = Locked nucleic acid
  modified_base 1: mod_base = OTHER; note = 5-methyl cytidine
  modified_base 17..19: mod_base = OTHER; note = 5-methyl cytidine
ctgtaggtatggagaaccct

SEQ ID NO: 834 - DNA, 20 bp, synthetic construct
  source 1..20: mol_type = other DNA
  modified_base 1..3: mod_base = OTHER; note = Phosphorothioate linkage
  modified_base 5..16: mod_base = OTHER; note = Phosphorothioate linkage
  modified_base 18..20: mod_base = OTHER; note = Phosphorothioate linkage
  modified_base 1..5: mod_base = OTHER; note = 2'-O-(2-methoxyethyl) ribonucleotide
  misc_feature 1..5: note = RNA
  misc_feature 6..15: note = DNA
  misc_feature 16..20: note = RNA
  modified_base 16..20: mod_base = OTHER; note = 2'-O-(2-methoxyethyl) ribonucleotide
  modified_base 1: mod_base = OTHER; note = 5-methyl cytidine
  modified_base 17..19: mod_base = OTHER; note = 5-methyl cytidine
ctgtaggtatggagaaccct

SEQ ID NO: 835 - DNA, 20 bp, synthetic construct
  source 1..20: mol_type = other DNA
  modified_base 1..2: mod_base = OTHER; note = Phosphorothioate linkage
  modified_base 5..16: mod_base = OTHER; note = Phosphorothioate linkage
  modified_base 19..20: mod_base = OTHER; note = Phosphorothioate linkage
  modified_base 1..5: mod_base = OTHER; note = 2'-O-(2-methoxyethyl) ribonucleotide
  misc_feature 1..5: note = RNA
  misc_feature 6..15: note = DNA
  misc_feature 16..20: note = RNA
  modified_base 16..20: mod_base = OTHER; note = 2'-O-(2-methoxyethyl) ribonucleotide
  modified_base 1: mod_base = OTHER; note = 5-methyl cytidine
  modified_base 17..19: mod_base = OTHER; note = 5-methyl cytidine
ctgtaggtatggagaaccct

SEQ ID NO: 836 - DNA, 20 bp, synthetic construct
  source 1..20: mol_type = other DNA
  modified_base 5..16: mod_base = OTHER; note = Phosphorothioate linkage
  modified_base 1..5: mod_base = OTHER; note = 2'-O-(2-methoxyethyl) ribonucleotide
  misc_feature 1..5: note = RNA
  misc_feature 6..15: note = DNA
  misc_feature 16..20: note = RNA
  modified_base 16..20: mod_base = OTHER; note = 2'-O-(2-methoxyethyl) ribonucleotide
  modified_base 1: mod_base = OTHER; note = 5-methyl cytidine
  modified_base 17..19: mod_base = OTHER; note = 5-methyl cytidine
ctgtaggtatggagaaccct

SEQ ID NO: 837 - DNA, 20 bp, synthetic construct
  source 1..20: mol_type = other DNA
  modified_base 1..2: mod_base = OTHER; note = Phosphorothioate linkage
  modified_base 5..16: mod_base = OTHER; note = Phosphorothioate linkage
  modified_base 17..18: mod_base = OTHER; note = Phosphorothioate linkage
  modified_base 19..20: mod_base = OTHER; note = Phosphorothioate linkage
  modified_base 1..5: mod_base = OTHER; note = 2'-O-(2-methoxyethyl) ribonucleotide
  misc_feature 1..5: note = RNA
  misc_feature 6..15: note = DNA
  misc_feature 16..20: note = RNA
  modified_base 16..20: mod_base = OTHER; note = 2'-O-(2-methoxyethyl) ribonucleotide
  modified_base 1: mod_base = OTHER; note = 5-methyl cytidine
  modified_base 17..19: mod_base = OTHER; note = 5-methyl cytidine
ctgtaggtatggagaaccct

SEQ ID NO: 838 - DNA, 20 bp, synthetic construct
  source 1..20: mol_type = other DNA
  modified_base 2..3: mod_base = OTHER; note = Phosphorothioate linkage
  modified_base 4..17: mod_base = OTHER; note = Phosphorothioate linkage
  modified_base 18..19: mod_base = OTHER; note = Phosphorothioate linkage
  modified_base 1..5: mod_base = OTHER; note = 2'-O-(2-methoxyethyl) ribonucleotide
  misc_feature 1..5: note = RNA
  misc_feature 6..15: note = DNA
  misc_feature 16..20: note = RNA
  modified_base 16..20: mod_base = OTHER; note = 2'-O-(2-methoxyethyl) ribonucleotide
  modified_base 1: mod_base = OTHER; note = 5-methyl cytidine
  modified_base 17..19: mod_base = OTHER; note = 5-methyl cytidine
ctgtaggtatggagaaccct

SEQ ID NO: 839 - DNA, 20 bp, synthetic construct
  source 1..20: mol_type = other DNA
  modified_base 1..20: mod_base = OTHER; note = Phosphorothioate linkage
  modified_base 1..5: mod_base = OTHER; note = 2'-O-(2-methoxyethyl) ribonucleotide
  misc_feature 1..5: note = RNA
  misc_feature 6..7: note = DNA
  misc_feature 8: note = RNA
  modified_base 8: mod_base = OTHER; note = 2'-O-(2-methoxyethyl) ribonucleotide
  misc_feature 9..10: note = DNA
  misc_feature 11: note = RNA
  modified_base 11: mod_base = OTHER; note = 2'-O-(2-methoxyethyl) ribonucleotide
  misc_feature 12..13: note = DNA
  misc_feature 14: note = RNA
  modified_base 14: mod_base = OTHER; note = 2'-O-(2-methoxyethyl) ribonucleotide
  misc_feature 15: note = DNA
  misc_feature 16..20: note = RNA
  modified_base 16..20: mod_base = OTHER; note = 2'-O-(2-methoxyethyl) ribonucleotide
  modified_base 1: mod_base = OTHER; note = 5-methyl cytidine
  modified_base 17..19: mod_base = OTHER; note = 5-methyl cytidine
ctgtaggtatggagaaccct

SEQ ID NO: 840 - DNA, 22 bp, synthetic construct
  source 1..22: mol_type = other DNA
  modified_base 1..22: mod_base = OTHER; note = Phosphorothioate linkage
  modified_base 1..6: mod_base = OTHER; note = 2'-O-(2-methoxyethyl) ribonucleotide
  misc_feature 1..6: note = RNA
  misc_feature 7..16: note = DNA
  misc_feature 17..22: note = RNA
  modified_base 17..22: mod_base = OTHER; note = 2'-O-(2-methoxyethyl) ribonucleotide
  modified_base 2: mod_base = OTHER; note = 5-methyl cytidine
  modified_base 18..20: mod_base = OTHER; note = 5-methyl cytidine
tctgtaggtatggagaaccctt

SEQ ID NO: 841 - DNA, 22 bp, synthetic construct
  source 1..22: mol_type = other DNA
  modified_base 1..22: mod_base = OTHER; note = Phosphorothioate linkage
  modified_base 1: mod_base = OTHER; note = Locked nucleic acid
  modified_base 2..3: mod_base = OTHER; note = 2'-O-(2-methoxyethyl) ribonucleotide
  modified_base 4: mod_base = OTHER; note = Locked nucleic acid
  modified_base 5..6: mod_base = OTHER; note = 2'-O-(2-methoxyethyl) ribonucleotide
  misc_feature 1..6: note = RNA
  misc_feature 7..16: note = DNA
  misc_feature 17..22: note = RNA
  modified_base 17..18: mod_base = OTHER; note = 2'-O-(2-methoxyethyl) ribonucleotide
  modified_base 19: mod_base = OTHER; note = Locked nucleic acid
  modified_base 20..21: mod_base = OTHER; note = 2'-O-(2-methoxyethyl) ribonucleotide
  modified_base 22: mod_base = OTHER; note = Locked nucleic acid
  modified_base 2: mod_base = OTHER; note = 5-methyl cytidine
  modified_base 18..20: mod_base = OTHER; note = 5-methyl cytidine
tctgtaggtatggagaaccctt

SEQ ID NO: 842 - DNA, 22 bp, synthetic construct
  source 1..22: mol_type = other DNA
  modified_base 1..22: mod_base = OTHER; note = Phosphorothioate linkage
  modified_base 1..2: mod_base = OTHER; note = 2'-O-(2-methoxyethyl) ribonucleotide
  modified_base 3: mod_base = OTHER; note = Locked nucleic acid
  modified_base 4: mod_base = OTHER; note = 2'-O-(2-methoxyethyl) ribonucleotide
  modified_base 5: mod_base = OTHER; note = Locked nucleic acid
  modified_base 6: mod_base = OTHER; note = 2'-O-(2-methoxyethyl) ribonucleotide
  misc_feature 1..6: note = RNA
  misc_feature 7..16: note = DNA
  misc_feature 17..22: note = RNA
  modified_base 17: mod_base = OTHER; note = 2'-O-(2-methoxyethyl) ribonucleotide
  modified_base 18: mod_base = OTHER; note = Locked nucleic acid
  modified_base 19: mod_base = OTHER; note = 2'-O-(2-methoxyethyl) ribonucleotide
  modified_base 20: mod_base = OTHER; note = Locked nucleic acid
  modified_base 21..22: mod_base = OTHER; note = 2'-O-(2-methoxyethyl) ribonucleotide
  modified_base 2: mod_base = OTHER; note = 5-methyl cytidine
  modified_base 18..20: mod_base = OTHER; note = 5-methyl cytidine
tctgtaggtatggagaaccctt

SEQ ID NO: 843 - DNA, 22 bp, synthetic construct
  source 1..22: mol_type = other DNA
  modified_base 2..3: mod_base = OTHER; note = Phosphorothioate linkage
  modified_base 4..5: mod_base = OTHER; note = Phosphorothioate linkage
  modified_base 6..17: mod_base = OTHER; note = Phosphorothioate linkage
  modified_base 18..19: mod_base = OTHER; note = Phosphorothioate linkage
  modified_base 20..21: mod_base = OTHER; note = Phosphorothioate linkage
  modified_base 1..6: mod_base = OTHER; note = 2'-O-(2-methoxyethyl) ribonucleotide
  misc_feature 1..6: note = RNA
  misc_feature 7..16: note = DNA
  misc_feature 17..22: note = RNA
  modified_base 17..22: mod_base = OTHER; note = 2'-O-(2-methoxyethyl) ribonucleotide
  modified_base 2: mod_base = OTHER; note = 5-methyl cytidine
  modified_base 18..20: mod_base = OTHER; note = 5-methyl cytidine
tctgtaggtatggagaaccctt

SEQ ID NO: 844 - DNA, 22 bp, synthetic construct
  source 1..22: mol_type = other DNA
  modified_base 1..2: mod_base = OTHER; note = Phosphorothioate linkage
  modified_base 3..4: mod_base = OTHER; note = Phosphorothioate linkage
  modified_base 5..18: mod_base = OTHER; note = Phosphorothioate linkage
  modified_base 19..20: mod_base = OTHER; note = Phosphorothioate linkage
  modified_base 21..22: mod_base = OTHER; note = Phosphorothioate linkage
  modified_base 1..6: mod_base = OTHER; note = 2'-O-(2-methoxyethyl) ribonucleotide
  misc_feature 1..6: note = RNA
  misc_feature 7..16: note = DNA
  misc_feature 17..22: note = RNA
  modified_base 17..22: mod_base = OTHER; note = 2'-O-(2-methoxyethyl) ribonucleotide
  modified_base 2: mod_base = OTHER; note = 5-methyl cytidine
  modified_base 18..20: mod_base = OTHER; note = 5-methyl cytidine
tctgtaggtatggagaaccctt

SEQ ID NO: 845 - DNA, 22 bp, synthetic construct
  source 1..22: mol_type = other DNA
  modified_base 1..2: mod_base = OTHER; note = Phosphorothioate linkage
  modified_base 3..5: mod_base = OTHER; note = Phosphorothioate linkage
  modified_base 6..17: mod_base = OTHER; note = Phosphorothioate linkage
  modified_base 18..20: mod_base = OTHER; note = Phosphorothioate linkage
  modified_base 21..22: mod_base = OTHER; note = Phosphorothioate linkage
  modified_base 1..6: mod_base = OTHER; note = 2'-O-(2-methoxyethyl) ribonucleotide
  misc_feature 1..6: note = RNA
  misc_feature 7..16: note = DNA
  misc_feature 17..22: note = RNA
  modified_base 17..22: mod_base = OTHER; note = 2'-O-(2-methoxyethyl) ribonucleotide
  modified_base 2: mod_base = OTHER; note = 5-methyl cytidine
  modified_base 18..20: mod_base = OTHER; note = 5-methyl cytidine
tctgtaggtatggagaaccctt

SEQ ID NO: 846 - DNA, 24 bp, synthetic construct
  source 1..24: mol_type = other DNA
  modified_base 1..24: mod_base = OTHER; note = Phosphorothioate linkage
  modified_base 1..7: mod_base = OTHER; note = 2'-O-(2-methoxyethyl) ribonucleotide
  misc_feature 1..7: note = RNA
  misc_feature 8..17: note = DNA
  misc_feature 18..24: note = RNA
  modified_base 18..24: mod_base = OTHER; note = 2'-O-(2-methoxyethyl) ribonucleotide
  modified_base 3: mod_base = OTHER; note = 5-methyl cytidine
  modified_base 19..21: mod_base = OTHER; note = 5-methyl cytidine
atctgtaggtatggagaacccttt

SEQ ID NO: 847 - DNA, 24 bp, synthetic construct
  source 1..24: mol_type = other DNA
  modified_base 1..24: mod_base = OTHER; note = Phosphorothioate linkage
  modified_base 1: mod_base = OTHER; note = Locked nucleic acid
  modified_base 2..3: mod_base = OTHER; note = 2'-O-(2-methoxyethyl) ribonucleotide
  modified_base 4: mod_base = OTHER; note = Locked nucleic acid
  modified_base 5..7: mod_base = OTHER; note = 2'-O-(2-methoxyethyl) ribonucleotide
  misc_feature 1..7: note = RNA
  misc_feature 8..17: note = DNA
  misc_feature 18..24: note = RNA
  modified_base 18..20: mod_base = OTHER; note = 2'-O-(2-methoxyethyl) ribonucleotide
  modified_base 21: mod_base = OTHER; note = Locked nucleic acid
  modified_base 22..23: mod_base = OTHER; note = 2'-O-(2-methoxyethyl) ribonucleotide
  modified_base 24: mod_base = OTHER; note = Locked nucleic acid
  modified_base 3: mod_base = OTHER; note = 5-methyl cytidine
  modified_base 19..21: mod_base = OTHER; note = 5-methyl cytidine
atctgtaggtatggagaacccttt

SEQ ID NO: 848 - DNA, 24 bp, synthetic construct
  source 1..24: mol_type = other DNA
  modified_base 1..24: mod_base = OTHER; note = Phosphorothioate linkage
  modified_base 1..2: mod_base = OTHER; note = 2'-O-(2-methoxyethyl) ribonucleotide
  modified_base 3: mod_base = OTHER; note = Locked nucleic acid
  modified_base 4..5: mod_base = OTHER; note = 2'-O-(2-methoxyethyl) ribonucleotide
  modified_base 6: mod_base = OTHER; note = Locked nucleic acid
  modified_base 7: mod_base = OTHER; note = 2'-O-(2-methoxyethyl) ribonucleotide
  misc_feature 1..7: note = RNA
  misc_feature 8..17: note = DNA
  misc_feature 18..24: note = RNA
  modified_base 18: mod_base = OTHER; note = 2'-O-(2-methoxyethyl) ribonucleotide
  modified_base 19: mod_base = OTHER; note = Locked nucleic acid
  modified_base 20..21: mod_base = OTHER; note = 2'-O-(2-methoxyethyl) ribonucleotide
  modified_base 22: mod_base = OTHER; note = Locked nucleic acid
  modified_base 23..24: mod_base = OTHER; note = 2'-O-(2-methoxyethyl) ribonucleotide
  modified_base 3: mod_base = OTHER; note = 5-methyl cytidine
  modified_base 19..21: mod_base = OTHER; note = 5-methyl cytidine
atctgtaggtatggagaacccttt

SEQ ID NO: 849 - DNA, 24 bp, synthetic construct
  source 1..24: mol_type = other DNA
  modified_base 1..2: mod_base = OTHER; note = Phosphorothioate linkage
  modified_base 3..4: mod_base = OTHER; note = Phosphorothioate linkage
  modified_base 5..6: mod_base = OTHER; note = Phosphorothioate linkage
  modified_base 7..18: mod_base = OTHER; note = Phosphorothioate linkage
  modified_base 19..20: mod_base = OTHER; note = Phosphorothioate linkage
  modified_base 21..22: mod_base = OTHER; note = Phosphorothioate linkage
  modified_base 23..24: mod_base = OTHER; note = Phosphorothioate linkage
  modified_base 1..7: mod_base = OTHER; note = 2'-O-(2-methoxyethyl) ribonucleotide
  misc_feature 1..7: note = RNA
  misc_feature 8..17: note = DNA
  misc_feature 18..24: note = RNA
  modified_base 18..24: mod_base = OTHER; note = 2'-O-(2-methoxyethyl) ribonucleotide
  modified_base 3: mod_base = OTHER; note = 5-methyl cytidine
  modified_base 19..21: mod_base = OTHER; note = 5-methyl cytidine
atctgtaggtatggagaacccttt

SEQ ID NO: 850 - DNA, 24 bp, synthetic construct
  source 1..24: mol_type = other DNA
  modified_base 2..3: mod_base = OTHER; note = Phosphorothioate linkage
  modified_base 4..5: mod_base = OTHER; note = Phosphorothioate linkage
  modified_base 6..19: mod_base = OTHER; note = Phosphorothioate linkage
  modified_base 20..21: mod_base = OTHER; note = Phosphorothioate linkage
  modified_base 22..23: mod_base = OTHER; note = Phosphorothioate linkage
  modified_base 1..7: mod_base = OTHER; note = 2'-O-(2-methoxyethyl) ribonucleotide
  misc_feature 1..7: note = RNA
  misc_feature 8..17: note = DNA
  misc_feature 18..24: note = RNA
  modified_base 18..24: mod_base = OTHER; note = 2'-O-(2-methoxyethyl) ribonucleotide
  modified_base 3: mod_base = OTHER; note = 5-methyl cytidine
  modified_base 19..21: mod_base = OTHER; note = 5-methyl cytidine
atctgtaggtatggagaacccttt

SEQ ID NO: 851 - DNA, 24 bp, synthetic construct
  source 1..24: mol_type = other DNA
  modified_base 1..2: mod_base = OTHER; note = Phosphorothioate linkage
  modified_base 3..4: mod_base = OTHER; note = Phosphorothioate linkage
  modified_base 5..20: mod_base = OTHER; note = Phosphorothioate linkage
  modified_base 21..22: mod_base = OTHER; note = Phosphorothioate linkage
  modified_base 23..24: mod_base = OTHER; note = Phosphorothioate linkage
  modified_base 1..7: mod_base = OTHER; note = 2'-O-(2-methoxyethyl) ribonucleotide
  misc_feature 1..7: note = RNA
  misc_feature 8..17: note = DNA
  misc_feature 18..24: note = RNA
  modified_base 18..24: mod_base = OTHER; note = 2'-O-(2-methoxyethyl) ribonucleotide
  modified_base 3: mod_base = OTHER; note = 5-methyl cytidine
  modified_base 19..21: mod_base = OTHER; note = 5-methyl cytidine
atctgtaggtatggagaacccttt

SEQ ID NO: 852 - DNA, 20 bp, synthetic construct
  source 1..20: mol_type = other DNA
  modified_base 1..20: mod_base = OTHER; note = Phosphorothioate linkage
  modified_base 1..3: mod_base = OTHER; note = 2'-O-(2-methoxyethyl) ribonucleotide
  modified_base 4: mod_base = OTHER; note = Locked nucleic acid
  modified_base 5: mod_base = OTHER; note = 2'-O-(2-methoxyethyl) ribonucleotide
  misc_feature 1..5: note = RNA
  misc_feature 6..15: note = DNA
  misc_feature 16..20: note = RNA
  modified_base 16: mod_base = OTHER; note = 2'-O-(2-methoxyethyl) ribonucleotide
  modified_base 17: mod_base = OTHER; note = Locked nucleic acid
  modified_base 18..20: mod_base = OTHER; note = 2'-O-(2-methoxyethyl) ribonucleotide
  modified_base 1: mod_base = OTHER; note = 5-methyl cytidine
  modified_base 5: mod_base = OTHER; note = 5-methyl cytidine
  modified_base 7: mod_base = OTHER; note = 5-methyl cytidine
  modified_base 15: mod_base = OTHER; note = 5-methyl cytidine
ctttctctgtgggtctaggg

SEQ ID NO: 853 - DNA, 20 bp, synthetic construct
  source 1..20: mol_type = other DNA
  modified_base 1..20: mod_base = OTHER; note = Phosphorothioate linkage
  modified_base 1..2: mod_base = OTHER; note = 2'-O-(2-methoxyethyl) ribonucleotide
  modified_base 3: mod_base = OTHER; note = Locked nucleic acid
  modified_base 4..5: mod_base = OTHER; note = 2'-O-(2-methoxyethyl) ribonucleotide
  misc_feature 1..5: note = RNA
  misc_feature 6..15: note = DNA
  misc_feature 16..20: note = RNA
  modified_base 16..17: mod_base = OTHER; note = 2'-O-(2-methoxyethyl) ribonucleotide
  modified_base 18: mod_base = OTHER; note = Locked nucleic acid
  modified_base 19..20: mod_base = OTHER; note = 2'-O-(2-methoxyethyl) ribonucleotide
  modified_base 1: mod_base = OTHER; note = 5-methyl cytidine
  modified_base 5: mod_base = OTHER; note = 5-methyl cytidine
  modified_base 7: mod_base = OTHER; note = 5-methyl cytidine
  modified_base 15: mod_base = OTHER; note = 5-methyl cytidine
ctttctctgtgggtctaggg

SEQ ID NO: 854 - DNA, 20 bp, synthetic construct
  source 1..20: mol_type = other DNA
  modified_base 1..20: mod_base = OTHER; note = Phosphorothioate linkage
  modified_base 1: mod_base = OTHER; note = 2'-O-(2-methoxyethyl) ribonucleotide
  modified_base 2: mod_base = OTHER; note = Locked nucleic acid
  modified_base 3..5: mod_base = OTHER; note = 2'-O-(2-methoxyethyl) ribonucleotide
  misc_feature 1..5: note = RNA
  misc_feature 6..15: note = DNA
  misc_feature 16..20: note = RNA
  modified_base 16..20: mod_base = OTHER; note = 2'-O-(2-methoxyethyl) ribonucleotide
  modified_base 19: mod_base = OTHER; note = Locked nucleic acid
  modified_base 1: mod_base = OTHER; note = 5-methyl cytidine
  modified_base 5: mod_base = OTHER; note = 5-methyl cytidine
  modified_base 7: mod_base = OTHER; note = 5-methyl cytidine
  modified_base 15: mod_base = OTHER; note = 5-methyl cytidine
ctttctctgtgggtctaggg

SEQ ID NO: 855 - DNA, 20 bp, synthetic construct
  source 1..20: mol_type = other DNA
  modified_base 1..20: mod_base = OTHER; note = Phosphorothioate linkage
  modified_base 1: mod_base = OTHER; note = 2'-O-(2-methoxyethyl) ribonucleotide
  modified_base 2: mod_base = OTHER; note = Locked nucleic acid
  modified_base 3: mod_base = OTHER; note = 2'-O-(2-methoxyethyl) ribonucleotide
  modified_base 4: mod_base = OTHER; note = Locked nucleic acid
  modified_base 5: mod_base = OTHER; note = 2'-O-(2-methoxyethyl) ribonucleotide
  misc_feature 1..5: note = RNA
  misc_feature 6..15: note = DNA
  misc_feature 16..20: note = RNA
  modified_base 16: mod_base = OTHER; note = 2'-O-(2-methoxyethyl) ribonucleotide
  modified_base 17: mod_base = OTHER; note = Locked nucleic acid
  modified_base 18: mod_base = OTHER; note = 2'-O-(2-methoxyethyl) ribonucleotide
  modified_base 19: mod_base = OTHER; note = Locked nucleic acid
  modified_base 20: mod_base = OTHER; note = 2'-O-(2-methoxyethyl) ribonucleotide
  modified_base 1: mod_base = OTHER; note = 5-methyl cytidine
  modified_base 5: mod_base = OTHER; note = 5-methyl cytidine
  modified_base 7: mod_base = OTHER; note = 5-methyl cytidine
  modified_base 15: mod_base = OTHER; note = 5-methyl cytidine
ctttctctgtgggtctaggg

SEQ ID NO: 856 - DNA, 20 bp, synthetic construct
  source 1..20: mol_type = other DNA
  modified_base 1..20: mod_base = OTHER; note = Phosphorothioate linkage
  modified_base 1: mod_base = OTHER; note = Locked nucleic acid
  modified_base 2..3: mod_base = OTHER; note = 2'-O-(2-methoxyethyl) ribonucleotide
  modified_base 4: mod_base = OTHER; note = Locked nucleic acid
  modified_base 5: mod_base = OTHER; note = 2'-O-(2-methoxyethyl) ribonucleotide
  misc_feature 1..5: note = RNA
  misc_feature 6..15: note = DNA
  misc_feature 16..20: note = RNA
  modified_base 16: mod_base = OTHER; note = 2'-O-(2-methoxyethyl) ribonucleotide
  modified_base 17: mod_base = OTHER; note = Locked nucleic acid
  modified_base 18..19: mod_base = OTHER; note = 2'-O-(2-methoxyethyl) ribonucleotide
  modified_base 20: mod_base = OTHER; note = Locked nucleic acid
  modified_base 1: mod_base = OTHER; note = 5-methyl cytidine
  modified_base 5: mod_base = OTHER; note = 5-methyl cytidine
  modified_base 7: mod_base = OTHER; note = 5-methyl cytidine
  modified_base 15: mod_base = OTHER; note = 5-methyl cytidine
ctttctctgtgggtctaggg

SEQ ID NO: 857 - DNA, 20 bp, synthetic construct
  source 1..20: mol_type = other DNA
  modified_base 1..20: mod_base = OTHER; note = Phosphorothioate linkage
  modified_base 1: mod_base = OTHER; note = Locked nucleic acid
  modified_base 2: mod_base = OTHER; note = 2'-O-(2-methoxyethyl) ribonucleotide
  modified_base 3: mod_base = OTHER; note = Locked nucleic acid
  modified_base 4..5: mod_base = OTHER; note = 2'-O-(2-methoxyethyl) ribonucleotide
  misc_feature 1..5: note = RNA
  misc_feature 6..15: note = DNA
  misc_feature 16..20: note = RNA
  modified_base 16..17: mod_base = OTHER; note = 2'-O-(2-methoxyethyl) ribonucleotide
  modified_base 18: mod_base = OTHER; note = Locked nucleic acid
  modified_base 19: mod_base = OTHER; note = 2'-O-(2-methoxyethyl) ribonucleotide
  modified_base 20: mod_base = OTHER; note = Locked nucleic acid
  modified_base 1: mod_base = OTHER; note = 5-methyl cytidine
  modified_base 5: mod_base = OTHER; note = 5-methyl cytidine
  modified_base 7: mod_base = OTHER; note = 5-methyl cytidine
  modified_base 15: mod_base = OTHER; note = 5-methyl cytidine
ctttctctgtgggtctaggg

SEQ ID NO: 858 - DNA, 20 bp, synthetic construct
  source 1..20: mol_type = other DNA
  modified_base 1..20: mod_base = OTHER; note = Phosphorothioate linkage
  modified_base 1..2: mod_base = OTHER; note = 2'-O-(2-methoxyethyl) ribonucleotide
  modified_base 3: mod_base = OTHER; note = Locked nucleic acid
  modified_base 4: mod_base = OTHER; note = 2'-O-(2-methoxyethyl) ribonucleotide
  modified_base 5: mod_base = OTHER; note = Locked nucleic acid
  misc_feature 1..5: note = RNA
  misc_feature 6..15: note = DNA
  misc_feature 16..20: note = RNA
  modified_base 16: mod_base = OTHER; note = Locked nucleic acid
  modified_base 17: mod_base = OTHER; note = 2'-O-(2-methoxyethyl) ribonucleotide
  modified_base 18: mod_base = OTHER; note = Locked nucleic acid
  modified_base 19..20: mod_base = OTHER; note = 2'-O-(2-methoxyethyl) ribonucleotide
  modified_base 1: mod_base = OTHER; note = 5-methyl cytidine
  modified_base 5: mod_base = OTHER; note = 5-methyl cytidine
  modified_base 7: mod_base = OTHER; note = 5-methyl cytidine
  modified_base 15: mod_base = OTHER; note = 5-methyl cytidine
ctttctctgtgggtctaggg

SEQ ID NO: 859 - DNA, 20 bp, synthetic construct
  source 1..20: mol_type = other DNA
  modified_base 1..20: mod_base = OTHER; note = Phosphorothioate linkage
  modified_base 1..5: mod_base = OTHER; note = 2'-O-(2-methoxyethyl) ribonucleotide
  misc_feature 1..5: note = RNA
  misc_feature 6..7: note = DNA
  misc_feature 8: note = RNA
  modified_base 8: mod_base = OTHER; note = 2'-O-(2-methoxyethyl) ribonucleotide
  misc_feature 9..10: note = DNA
  misc_feature 11: note = RNA
  modified_base 11: mod_base = OTHER; note = 2'-O-(2-methoxyethyl) ribonucleotide
  misc_feature 12..13: note = DNA
  misc_feature 14: note = RNA
  modified_base 14: mod_base = OTHER; note = 2'-O-(2-methoxyethyl) ribonucleotide
  misc_feature 15: note = DNA
  misc_feature 16..20: note = RNA
  modified_base 16..20: mod_base = OTHER; note = 2'-O-(2-methoxyethyl) ribonucleotide
  modified_base 1: mod_base = OTHER; note = 5-methyl cytidine
  modified_base 5: mod_base = OTHER; note = 5-methyl cytidine
  modified_base 7: mod_base = OTHER; note = 5-methyl cytidine
  modified_base 15: mod_base = OTHER; note = 5-methyl cytidine
ctttctctgtgggtctaggg

SEQ ID NO: 860 - DNA, 20 bp, synthetic construct
  source 1..20: mol_type = other DNA
  modified_base 1..20: mod_base = OTHER; note = Phosphorothioate linkage
  modified_base 1: mod_base = OTHER; note = 2'-O-(2-methoxyethyl) ribonucleotide
  modified_base 1: mod_base = OTHER; note = 2'-O-(2-methoxyethyl) ribonucleotide
  modified_base 2: mod_base = OTHER; note = Locked nucleic acid
  modified_base 3: mod_base = OTHER; note = 2'-O-(2-methoxyethyl) ribonucleotide
  modified_base 4: mod_base = OTHER; note = Locked nucleic acid
  modified_base 5: mod_base = OTHER; note = 2'-O-(2-methoxyethyl) ribonucleotide
  misc_feature 1..5: note = RNA
  misc_feature 6..7: note = DNA
  misc_feature 8: note = RNA
  modified_base 8: mod_base = OTHER; note = 2'-O-(2-methoxyethyl) ribonucleotide
  misc_feature 9..10: note = DNA
  misc_feature 11: note = RNA
  modified_base 11: mod_base = OTHER; note = 2'-O-(2-methoxyethyl) ribonucleotide
  misc_feature 12..13: note = DNA
  misc_feature 14: note = RNA
  modified_base 14: mod_base = OTHER; note = 2'-O-(2-methoxyethyl) ribonucleotide
  misc_feature 15: note = DNA
  misc_feature 16..20: note = RNA
  modified_base 16: mod_base = OTHER; note = 2'-O-(2-methoxyethyl) ribonucleotide
  modified_base 17: mod_base = OTHER; note = Locked nucleic acid
  modified_base 18: mod_base = OTHER; note = 2'-O-(2-methoxyethyl) ribonucleotide
  modified_base 19: mod_base = OTHER; note = Locked nucleic acid
  modified_base 20: mod_base = OTHER; note = 2'-O-(2-methoxyethyl) ribonucleotide
  modified_base 1: mod_base = OTHER; note = 5-methyl cytidine
  modified_base 5: mod_base = OTHER; note = 5-methyl cytidine
  modified_base 7: mod_base = OTHER; note = 5-methyl cytidine
  modified_base 15: mod_base = OTHER; note = 5-methyl cytidine
ctttctctgtgggtctaggg

SEQ ID NO: 861 - DNA, 20 bp, synthetic construct
  source 1..20: mol_type = other DNA
  modified_base 1..3: mod_base = OTHER; note = Phosphorothioate linkage
  modified_base 5..16: mod_base = OTHER; note = Phosphorothioate linkage
  modified_base 18..20: mod_base = OTHER; note = Phosphorothioate linkage
  modified_base 1..5: mod_base = OTHER; note = 2'-O-(2-methoxyethyl) ribonucleotide
  misc_feature 1..5: note = RNA
  misc_feature 6..15: note = DNA
  misc_feature 16..20: note = RNA
  modified_base 16..20: mod_base = OTHER; note = 2'-O-(2-methoxyethyl) ribonucleotide
  modified_base 1: mod_base = OTHER; note = 5-methyl cytidine
  modified_base 5: mod_base = OTHER; note = 5-methyl cytidine
  modified_base 7: mod_base = OTHER; note = 5-methyl cytidine
  modified_base 15: mod_base = OTHER; note = 5-methyl cytidine
ctttctctgtgggtctaggg

SEQ ID NO: 862 - DNA, 20 bp, synthetic construct
  source 1..20: mol_type = other DNA
  modified_base 1..2: mod_base = OTHER; note = Phosphorothioate linkage
  modified_base 5..16: mod_base = OTHER; note = Phosphorothioate linkage
  modified_base 19..20: mod_base = OTHER; note = Phosphorothioate linkage
  modified_base 1..5: mod_base = OTHER; note = 2'-O-(2-methoxyethyl) ribonucleotide
  misc_feature 1..5: note = RNA
  misc_feature 6..15: note = DNA
  misc_feature 16..20: note = RNA
  modified_base 16..20: mod_base = OTHER; note = 2'-O-(2-methoxyethyl) ribonucleotide
  modified_base 1: mod_base = OTHER; note = 5-methyl cytidine
  modified_base 5: mod_base = OTHER; note = 5-methyl cytidine
  modified_base 7: mod_base = OTHER; note = 5-methyl cytidine
  modified_base 15: mod_base = OTHER; note = 5-methyl cytidine
ctttctctgtgggtctaggg

SEQ ID NO: 863 - DNA, 20 bp, synthetic construct
  source 1..20: mol_type = other DNA
  modified_base 5..16: mod_base = OTHER; note = Phosphorothioate linkage
  modified_base 1..5: mod_base = OTHER; note = 2'-O-(2-methoxyethyl) ribonucleotide
  misc_feature 1..5: note = RNA
  misc_feature 6..15: note = DNA
  misc_feature 16..20: note = RNA
  modified_base 16..20: mod_base = OTHER; note = 2'-O-(2-methoxyethyl) ribonucleotide
  modified_base 1: mod_base = OTHER; note = 5-methyl cytidine
  modified_base 5: mod_base = OTHER; note = 5-methyl cytidine
  modified_base 7: mod_base = OTHER; note = 5-methyl cytidine
  modified_base 15: mod_base = OTHER; note = 5-methyl cytidine
ctttctctgtgggtctaggg

SEQ ID NO: 864 - DNA, 20 bp, synthetic construct
  source 1..20: mol_type = other DNA
  modified_base 1..2: mod_base = OTHER; note = Phosphorothioate linkage
  modified_base 3..4: mod_base = OTHER; note = Phosphorothioate linkage
  modified_base 5..16: mod_base = OTHER; note = Phosphorothioate linkage
  modified_base 17..18: mod_base = OTHER; note = Phosphorothioate linkage
  modified_base 19..20: mod_base = OTHER; note = Phosphorothioate linkage
  modified_base 1..5: mod_base = OTHER; note = 2'-O-(2-methoxyethyl) ribonucleotide
  misc_feature 1..5: note = RNA
  misc_feature 6..15: note = DNA
  misc_feature 16..20: note = RNA
  modified_base 16..20: mod_base = OTHER; note = 2'-O-(2-methoxyethyl) ribonucleotide
  modified_base 1: mod_base = OTHER; note = 5-methyl cytidine
  modified_base 5: mod_base = OTHER; note = 5-methyl cytidine
  modified_base 7: mod_base = OTHER; note = 5-methyl cytidine
  modified_base 15: mod_base = OTHER; note = 5-methyl cytidine
ctttctctgtgggtctaggg

SEQ ID NO: 865 - DNA, 20 bp, synthetic construct
  source 1..20: mol_type = other DNA
  modified_base 2..3: mod_base = OTHER; note = Phosphorothioate linkage
  modified_base 4..17: mod_base = OTHER; note = Phosphorothioate linkage
  modified_base 18..19: mod_base = OTHER; note = Phosphorothioate linkage
  modified_base 1..5: mod_base = OTHER; note = 2'-O-(2-methoxyethyl) ribonucleotide
  misc_feature 1..5: note = RNA
  misc_feature 6..15: note = DNA
  misc_feature 16..20: note = RNA
  modified_base 16..20: mod_base = OTHER; note = 2'-O-(2-methoxyethyl) ribonucleotide
  modified_base 1: mod_base = OTHER; note = 5-methyl cytidine
  modified_base 5: mod_base = OTHER; note = 5-methyl cytidine
  modified_base 7: mod_base = OTHER; note = 5-methyl cytidine
  modified_base 15: mod_base = OTHER; note = 5-methyl cytidine
ctttctctgtgggtctaggg

SEQ ID NO: 866 - DNA, 22 bp, synthetic construct
  source 1..22: mol_type = other DNA
  modified_base 1..22: mod_base = OTHER; note = Phosphorothioate linkage
  modified_base 1..6: mod_base = OTHER; note = 2'-O-(2-methoxyethyl) ribonucleotide
  misc_feature 1..6: note = RNA
  misc_feature 7..15: note = DNA
  misc_feature 16..22: note = RNA
  modified_base 16..22: mod_base = OTHER; note = 2'-O-(2-methoxyethyl) ribonucleotide
  modified_base 2: mod_base = OTHER; note = 5-methyl cytidine
  modified_base 6: mod_base = OTHER; note = 5-methyl cytidine
  modified_base 8: mod_base = OTHER; note = 5-methyl cytidine
  modified_base 16: mod_base = OTHER; note = 5-methyl cytidine
tctttctctgtgggtctagggt

SEQ ID NO: 867 - DNA, 22 bp, synthetic construct
  source 1..22: mol_type = other DNA
  modified_base 1..22: mod_base = OTHER; note = Phosphorothioate linkage
  modified_base 1: mod_base = OTHER; note = Locked nucleic acid
  modified_base 2..3: mod_base = OTHER; note = 2'-O-(2-methoxyethyl) ribonucleotide
  modified_base 4: mod_base = OTHER; note = Locked nucleic acid
  modified_base 5..6: mod_base = OTHER; note = 2'-O-(2-methoxyethyl) ribonucleotide
  misc_feature 1..6: note = RNA
  misc_feature 7..16: note = DNA
  misc_feature 17..22: note = RNA
  modified_base 17..18: mod_base = OTHER; note = 2'-O-(2-methoxyethyl) ribonucleotide
  modified_base 19: mod_base = OTHER; note = Locked nucleic acid
  modified_base 20..21: mod_base = OTHER; note = 2'-O-(2-methoxyethyl) ribonucleotide
  modified_base 22: mod_base = OTHER; note = Locked nucleic acid
  modified_base 2: mod_base = OTHER; note = 5-methyl cytidine
  modified_base 6: mod_base = OTHER; note = 5-methyl cytidine
  modified_base 8: mod_base = OTHER; note = 5-methyl cytidine
  modified_base 16: mod_base = OTHER; note = 5-methyl cytidine
tctttctctgtgggtctagggt

SEQ ID NO: 868 - DNA, 22 bp, synthetic construct
  source 1..22: mol_type = other DNA
  modified_base 1..22: mod_base = OTHER; note = Phosphorothioate linkage
  modified_base 1..2: mod_base = OTHER; note = 2'-O-(2-methoxyethyl) ribonucleotide
  modified_base 3: mod_base = OTHER; note = Locked nucleic acid
  modified_base 4: mod_base = OTHER; note = 2'-O-(2-methoxyethyl) ribonucleotide
  modified_base 5: mod_base = OTHER; note = Locked nucleic acid
  modified_base 6: mod_base = OTHER; note = 2'-O-(2-methoxyethyl) ribonucleotide
  misc_feature 1..6: note = RNA
  misc_feature 7..16: note = DNA
  misc_feature 17..22: note = RNA
  modified_base 17: mod_base = OTHER; note = 2'-O-(2-methoxyethyl) ribonucleotide
  modified_base 18: mod_base = OTHER; note = Locked nucleic acid
  modified_base 19: mod_base = OTHER; note = 2'-O-(2-methoxyethyl) ribonucleotide
  modified_base 20: mod_base = OTHER; note = Locked nucleic acid
  modified_base 21..22: mod_base = OTHER; note = 2'-O-(2-methoxyethyl) ribonucleotide
  modified_base 2: mod_base = OTHER; note = 5-methyl cytidine
  modified_base 6: mod_base = OTHER; note = 5-methyl cytidine
  modified_base 8: mod_base = OTHER; note = 5-methyl cytidine
  modified_base 16: mod_base = OTHER; note = 5-methyl cytidine
tctttctctgtgggtctagggt

SEQ ID NO: 869 - DNA, 22 bp, synthetic construct
  source 1..22: mol_type = other DNA
  modified_base 2..3: mod_base = OTHER; note = Phosphorothioate linkage
  modified_base 4..5: mod_base = OTHER; note = Phosphorothioate linkage
  modified_base 6..17: mod_base = OTHER; note = Phosphorothioate linkage
  modified_base 18..19: mod_base = OTHER; note = Phosphorothioate linkage
  modified_base 20..21: mod_base = OTHER; note = Phosphorothioate linkage
  modified_base 1..6: mod_base = OTHER; note = 2'-O-(2-methoxyethyl) ribonucleotide
  misc_feature 1..6: note = RNA
  misc_feature 7..15: note = DNA
  misc_feature 16..22: note = RNA
  modified_base 17..22: mod_base = OTHER; note = 2'-O-(2-methoxyethyl) ribonucleotide
  modified_base 2: mod_base = OTHER; note = 5-methyl cytidine
  modified_base 6: mod_base = OTHER; note = 5-methyl cytidine
  modified_base 8: mod_base = OTHER; note = 5-methyl cytidine
  modified_base 16: mod_base = OTHER; note = 5-methyl cytidine
tctttctctgtgggtctagggt

SEQ ID NO: 870 - DNA, 22 bp, synthetic construct
  source 1..22: mol_type = other DNA
  modified_base 1..2: mod_base = OTHER; note = Phosphorothioate linkage
  modified_base 3..4: mod_base = OTHER; note = Phosphorothioate linkage
  modified_base 5..18: mod_base = OTHER; note = Phosphorothioate linkage
  modified_base 19..20: mod_base = OTHER; note = Phosphorothioate linkage
  modified_base 21..22: mod_base = OTHER; note = Phosphorothioate linkage
  modified_base 1..6: mod_base = OTHER; note = 2'-O-(2-methoxyethyl) ribonucleotide
  misc_feature 1..6: note = RNA
  misc_feature 7..15: note = DNA
  misc_feature 16..22: note = RNA
  modified_base 17..22: mod_base = OTHER; note = 2'-O-(2-methoxyethyl) ribonucleotide
  modified_base 2: mod_base = OTHER; note = 5-methyl cytidine
  modified_base 6: mod_base = OTHER; note = 5-methyl cytidine
  modified_base 8: mod_base = OTHER; note = 5-methyl cytidine
  modified_base 16: mod_base = OTHER; note = 5-methyl cytidine
tctttctctgtgggtctagggt

SEQ ID NO: 871 - DNA, 22 bp, synthetic construct
  source 1..22: mol_type = other DNA
  modified_base 1..2: mod_base = OTHER; note = Phosphorothioate linkage
  modified_base 3..5: mod_base = OTHER; note = Phosphorothioate linkage
  modified_base 6..17: mod_base = OTHER; note = Phosphorothioate linkage
  modified_base 18..20: mod_base = OTHER; note = Phosphorothioate linkage
  modified_base 21..22: mod_base = OTHER; note = Phosphorothioate linkage
  modified_base 1..6: mod_base = OTHER; note = 2'-O-(2-methoxyethyl) ribonucleotide
  misc_feature 1..6: note = RNA
  misc_feature 7..15: note = DNA
  misc_feature 16..22: note = RNA
  modified_base 17..22: mod_base = OTHER; note = 2'-O-(2-methoxyethyl) ribonucleotide
  modified_base 2: mod_base = OTHER; note = 5-methyl cytidine
  modified_base 6: mod_base = OTHER; note = 5-methyl cytidine
  modified_base 8: mod_base = OTHER; note = 5-methyl cytidine
  modified_base 16: mod_base = OTHER; note = 5-methyl cytidine
tctttctctgtgggtctagggt

SEQ ID NO: 872 - DNA, 24 bp, synthetic construct
  source 1..24: mol_type = other DNA
  modified_base 1..24: mod_base = OTHER; note = Phosphorothioate linkage
  modified_base 1..7: mod_base = OTHER; note = 2'-O-(2-methoxyethyl) ribonucleotide
  misc_feature 1..7: note = RNA
  misc_feature 8..17: note = DNA
  misc_feature 18..24: note = RNA
  modified_base 18..24: mod_base = OTHER; note = 2'-O-(2-methoxyethyl) ribonucleotide
  modified_base 3: mod_base = OTHER; note = 5-methyl cytidine
  modified_base 7: mod_base = OTHER; note = 5-methyl cytidine
  modified_base 9: mod_base = OTHER; note = 5-methyl cytidine
  modified_base 17: mod_base = OTHER; note = 5-methyl cytidine
  modified_base 24: mod_base = OTHER; note = 5-methyl cytidine
atctttctctgtgggtctagggtc

SEQ ID NO: 873 - DNA, 24 bp, synthetic construct
  source 1..24: mol_type = other DNA
  modified_base 1..24: mod_base = OTHER; note = Phosphorothioate linkage
  modified_base 1: mod_base = OTHER; note = Locked nucleic acid
  modified_base 2..3: mod_base = OTHER; note = 2'-O-(2-methoxyethyl) ribonucleotide
  modified_base 4: mod_base = OTHER; note = Locked nucleic acid
  modified_base 5..7: mod_base = OTHER; note = 2'-O-(2-methoxyethyl) ribonucleotide
  misc_feature 1..7: note = RNA
  misc_feature 8..17: note = DNA
  misc_feature 18..24: note = RNA
  modified_base 18..20: mod_base = OTHER; note = 2'-O-(2-methoxyethyl) ribonucleotide
  modified_base 21: mod_base = OTHER; note = Locked nucleic acid
  modified_base 22..23: mod_base = OTHER; note = 2'-O-(2-methoxyethyl) ribonucleotide
  modified_base 24: mod_base = OTHER; note = Locked nucleic acid
  modified_base 3: mod_base = OTHER; note = 5-methyl cytidine
  modified_base 7: mod_base = OTHER; note = 5-methyl cytidine
  modified_base 9: mod_base = OTHER; note = 5-methyl cytidine
  modified_base 17: mod_base = OTHER; note = 5-methyl cytidine
  modified_base 24: mod_base = OTHER; note = 5-methyl cytidine
atctttctctgtgggtctagggtc

SEQ ID NO: 874 - DNA, 24 bp, synthetic construct
  source 1..24: mol_type = other DNA
  modified_base 1..24: mod_base = OTHER; note = Phosphorothioate linkage
  modified_base 1..2: mod_base = OTHER; note = 2'-O-(2-methoxyethyl) ribonucleotide
  modified_base 3: mod_base = OTHER; note = Locked nucleic acid
  modified_base 4..5: mod_base = OTHER; note = 2'-O-(2-methoxyethyl) ribonucleotide
  modified_base 6: mod_base = OTHER; note = Locked nucleic acid
  modified_base 7: mod_base = OTHER; note = 2'-O-(2-methoxyethyl) ribonucleotide
  misc_feature 1..7: note = RNA
  misc_feature 8..17: note = DNA
  misc_feature 18..24: note = RNA
  modified_base 18: mod_base = OTHER; note = 2'-O-(2-methoxyethyl) ribonucleotide
  modified_base 19: mod_base = OTHER; note = Locked nucleic acid
  modified_base 20..21: mod_base = OTHER; note = 2'-O-(2-methoxyethyl) ribonucleotide
  modified_base 22: mod_base = OTHER; note = Locked nucleic acid
  modified_base 23..24: mod_base = OTHER; note = 2'-O-(2-methoxyethyl) ribonucleotide
  modified_base 3: mod_base = OTHER; note = 5-methyl cytidine
  modified_base 7: mod_base = OTHER; note = 5-methyl cytidine
  modified_base 9: mod_base = OTHER; note = 5-methyl cytidine
  modified_base 17: mod_base = OTHER; note = 5-methyl cytidine
  modified_base 24: mod_base = OTHER; note = 5-methyl cytidine
atctttctctgtgggtctagggtc

SEQ ID NO: 875 - DNA, 24 bp, synthetic construct
  source 1..24: mol_type = other DNA
  modified_base 1..2: mod_base = OTHER; note = Phosphorothioate linkage
  modified_base 3..4: mod_base = OTHER; note = Phosphorothioate linkage
  modified_base 5..6: mod_base = OTHER; note = Phosphorothioate linkage
  modified_base 7..18: mod_base = OTHER; note = Phosphorothioate linkage
  modified_base 19..20: mod_base = OTHER; note = Phosphorothioate linkage
  modified_base 21..22: mod_base = OTHER; note = Phosphorothioate linkage
  modified_base 23..24: mod_base = OTHER; note = Phosphorothioate linkage
  modified_base 1..7: mod_base = OTHER; note = 2'-O-(2-methoxyethyl) ribonucleotide
  misc_feature 1..7: note = RNA
  misc_feature 8..17: note = DNA
  misc_feature 18..24: note = RNA
  modified_base 18..24: mod_base = OTHER; note = 2'-O-(2-methoxyethyl) ribonucleotide
  modified_base 3: mod_base = OTHER; note = 5-methyl cytidine
  modified_base 7: mod_base = OTHER; note = 5-methyl cytidine
  modified_base 9: mod_base = OTHER; note = 5-methyl cytidine
  modified_base 17: mod_base = OTHER; note = 5-methyl cytidine
  modified_base 24: mod_base = OTHER; note = 5-methyl cytidine
atctttctctgtgggtctagggtc

SEQ ID NO: 876 - DNA, 24 bp, synthetic construct
  source 1..24: mol_type = other DNA
  modified_base 2..3: mod_base = OTHER; note = Phosphorothioate linkage
  modified_base 4..5: mod_base = OTHER; note = Phosphorothioate linkage
  modified_base 6..19: mod_base = OTHER; note = Phosphorothioate linkage
  modified_base 20..21: mod_base = OTHER; note = Phosphorothioate linkage
  modified_base 22..23: mod_base = OTHER; note = Phosphorothioate linkage
  modified_base 1..7: mod_base = OTHER; note = 2'-O-(2-methoxyethyl) ribonucleotide
  misc_feature 1..7: note = RNA
  misc_feature 8..17: note = DNA
  misc_feature 18..24: note = RNA
  modified_base 18..24: mod_base = OTHER; note = 2'-O-(2-methoxyethyl) ribonucleotide
  modified_base 3: mod_base = OTHER; note = 5-methyl cytidine
  modified_base 7: mod_base = OTHER; note = 5-methyl cytidine
  modified_base 9: mod_base = OTHER; note = 5-methyl cytidine
  modified_base 17: mod_base = OTHER; note = 5-methyl cytidine
  modified_base 24: mod_base = OTHER; note = 5-methyl cytidine
atctttctctgtgggtctagggtc

SEQ ID NO: 877 - DNA, 24 bp, synthetic construct
  source 1..24: mol_type = other DNA
  modified_base 1..2: mod_base = OTHER; note = Phosphorothioate linkage
  modified_base 3..4: mod_base = OTHER; note = Phosphorothioate linkage
  modified_base 5..20: mod_base = OTHER; note = Phosphorothioate linkage
  modified_base 21..22: mod_base = OTHER; note = Phosphorothioate linkage
  modified_base 23..24: mod_base = OTHER; note = Phosphorothioate linkage
  modified_base 1..7: mod_base = OTHER; note = 2'-O-(2-methoxyethyl) ribonucleotide
  misc_feature 1..7: note = RNA
  misc_feature 8..17: note = DNA
  misc_feature 18..24: note = RNA
  modified_base 18..24: mod_base = OTHER; note = 2'-O-(2-methoxyethyl) ribonucleotide
  modified_base 3: mod_base = OTHER; note = 5-methyl cytidine
  modified_base 7: mod_base = OTHER; note = 5-methyl cytidine
  modified_base 9: mod_base = OTHER; note = 5-methyl cytidine
  modified_base 17: mod_base = OTHER; note = 5-methyl cytidine
  modified_base 24: mod_base = OTHER; note = 5-methyl cytidine
atctttctctgtgggtctagggtc

SEQ ID NO: 878 - DNA, 20 bp, synthetic construct
  source 1..20: mol_type = other DNA
  modified_base 1..20: mod_base = OTHER; note = Phosphorothioate linkage
  modified_base 1..5: mod_base = OTHER; note = 2'-O-(2-methoxyethyl) ribonucleotide
  misc_feature 1..5: note = RNA
  misc_feature 6..15: note = DNA
  misc_feature 16..20: note = RNA
  modified_base 16..20: mod_base = OTHER; note = 2'-O-(2-methoxyethyl) ribonucleotide
  modified_base 4..5: mod_base = OTHER; note = 5-methyl cytidine
  modified_base 7: mod_base = OTHER; note = 5-methyl cytidine
  modified_base 11: mod_base = OTHER; note = 5-methyl cytidine
  modified_base 13: mod_base = OTHER; note = 5-methyl cytidine
  modified_base 15: mod_base = OTHER; note = 5-methyl cytidine
  modified_base 17: mod_base = OTHER; note = 5-methyl cytidine
ggacctctgtctctctctgg

SEQ ID NO: 879 - DNA, 20 bp, synthetic construct
  source 1..20: mol_type = other DNA
  modified_base 1..20: mod_base = OTHER; note = Phosphorothioate linkage
  modified_base 1..5: mod_base = OTHER; note = 2'-O-(2-methoxyethyl) ribonucleotide
  misc_feature 1..5: note = RNA
  misc_feature 6..15: note = DNA
  misc_feature 16..20: note = RNA
  modified_base 16..20: mod_base = OTHER; note = 2'-O-(2-methoxyethyl) ribonucleotide
  modified_base 1: mod_base = OTHER; note = 5-methyl cytidine
  modified_base 17..19: mod_base = OTHER; note = 5-methyl cytidine
ctgtaggtatggagaaccct

SEQ ID NO: 880 - DNA, 20 bp, synthetic construct
  source 1..20: mol_type = other DNA
  modified_base 1..20: mod_base = OTHER; note = Phosphorothioate linkage
  modified_base 1..4: mod_base = OTHER; note = 2'-O-(2-methoxyethyl) ribonucleotide
  modified_base 5: mod_base = OTHER; note = Locked nucleic acid
  misc_feature 1..5: note = RNA
  misc_feature 6..15: note = DNA
  misc_feature 16..20: note = RNA
  modified_base 16: mod_base = OTHER; note = Locked nucleic acid
  modified_base 17..20: mod_base = OTHER; note = 2'-O-(2-methoxyethyl) ribonucleotide
  modified_base 1: mod_base = OTHER; note = 5-methyl cytidine
  modified_base 17..19: mod_base = OTHER; note = 5-methyl cytidine
ctgtaggtatggagaaccct

SEQ ID NO: 881 - DNA, 20 bp, synthetic construct
  source 1..20: mol_type = other DNA
  modified_base 1..20: mod_base = OTHER; note = Phosphorothioate linkage
  modified_base 1..2: mod_base = OTHER; note = 2'-O-(2-methoxyethyl) ribonucleotide
  modified_base 3: mod_base = OTHER; note = Locked nucleic acid
  modified_base 4..5: mod_base = OTHER; note = 2'-O-(2-methoxyethyl) ribonucleotide
  misc_feature 1..5: note = RNA
  misc_feature 6..15: note = DNA
  misc_feature 16..20: note = RNA
  modified_base 16..17: mod_base = OTHER; note = 2'-O-(2-methoxyethyl) ribonucleotide
  modified_base 18: mod_base = OTHER; note = Locked nucleic acid
  modified_base 19..20: mod_base = OTHER; note = 2'-O-(2-methoxyethyl) ribonucleotide
  modified_base 1: mod_base = OTHER; note = 5-methyl cytidine
  modified_base 17..19: mod_base = OTHER; note = 5-methyl cytidine
ctgtaggtatggagaaccct

SEQ ID NO: 882 - DNA, 20 bp, synthetic construct
  source 1..20: mol_type = other DNA
  modified_base 1..20: mod_base = OTHER; note = Phosphorothioate linkage
  modified_base 1: mod_base = OTHER; note = Locked nucleic acid
  modified_base 2..5: mod_base = OTHER; note = 2'-O-(2-methoxyethyl) ribonucleotide
  misc_feature 1..5: note = RNA
  misc_feature 6..15: note = DNA
  misc_feature 16..20: note = RNA
  modified_base 16..19: mod_base = OTHER; note = 2'-O-(2-methoxyethyl) ribonucleotide
  modified_base 20: mod_base = OTHER; note = Locked nucleic acid
  modified_base 1: mod_base = OTHER; note = 5-methyl cytidine
  modified_base 17..19: mod_base = OTHER; note = 5-methyl cytidine
ctgtaggtatggagaaccct

SEQ ID NO: 883 - DNA, 20 bp, synthetic construct
  source 1..20: mol_type = other DNA
  modified_base 1..20: mod_base = OTHER; note = Phosphorothioate linkage
  modified_base 1..2: mod_base = OTHER; note = 2'-O-(2-methoxyethyl) ribonucleotide
  modified_base 3: mod_base = OTHER; note = Locked nucleic acid
  modified_base 4: mod_base = OTHER; note = 2'-O-(2-methoxyethyl) ribonucleotide
  modified_base 5: mod_base = OTHER; note = Locked nucleic acid
  misc_feature 1..5: note = RNA
  misc_feature 6..15: note = DNA
  misc_feature 16..20: note = RNA
  modified_base 16: mod_base = OTHER; note = Locked nucleic acid
  modified_base 17: mod_base = OTHER; note = 2'-O-(2-methoxyethyl) ribonucleotide
  modified_base 18: mod_base = OTHER; note = Locked nucleic acid
  modified_base 19..20: mod_base = OTHER; note = 2'-O-(2-methoxyethyl) ribonucleotide
  modified_base 1: mod_base = OTHER; note = 5-methyl cytidine
  modified_base 17..19: mod_base = OTHER; note = 5-methyl cytidine
ctgtaggtatggagaaccct

SEQ ID NO: 884 - DNA, 20 bp, synthetic construct
  source 1..20: mol_type = other DNA
  modified_base 1..20: mod_base = OTHER; note = Phosphorothioate linkage
  modified_base 1: mod_base = OTHER; note = Locked nucleic acid
  modified_base 2: mod_base = OTHER; note = 2'-O-(2-methoxyethyl) ribonucleotide
  modified_base 3: mod_base = OTHER; note = Locked nucleic acid
  modified_base 4..5: mod_base = OTHER; note = 2'-O-(2-methoxyethyl) ribonucleotide
  misc_feature 1..5: note = RNA
  misc_feature 6..15: note = DNA
  misc_feature 16..20: note = RNA
  modified_base 16..17: mod_base = OTHER; note = 2'-O-(2-methoxyethyl) ribonucleotide
  modified_base 18: mod_base = OTHER; note = Locked nucleic acid
  modified_base 19: mod_base = OTHER; note = 2'-O-(2-methoxyethyl) ribonucleotide
  modified_base 20: mod_base = OTHER; note = Locked nucleic acid
  modified_base 1: mod_base = OTHER; note = 5-methyl cytidine
  modified_base 17..19: mod_base = OTHER; note = 5-methyl cytidine
ctgtaggtatggagaaccct

SEQ ID NO: 885 - DNA, 20 bp, synthetic construct
  source 1..20: mol_type = other DNA
  modified_base 1..20: mod_base = OTHER; note = Phosphorothioate linkage
  modified_base 1: mod_base = OTHER; note = Locked nucleic acid
  modified_base 2: mod_base = OTHER; note = 2'-O-(2-methoxyethyl) ribonucleotide
  modified_base 3: mod_base = OTHER; note = Locked nucleic acid
  modified_base 4: mod_base = OTHER; note = 2'-O-(2-methoxyethyl) ribonucleotide
  modified_base 5: mod_base = OTHER; note = Locked nucleic acid
  misc_feature 1..5: note = RNA
  misc_feature 6..15: note = DNA
  misc_feature 16..20: note = RNA
  modified_base 16: mod_base = OTHER; note = Locked nucleic acid
  modified_base 17: mod_base = OTHER; note = 2'-O-(2-methoxyethyl) ribonucleotide
  modified_base 18: mod_base = OTHER; note = Locked nucleic acid
  modified_base 19: mod_base = OTHER; note = 2'-O-(2-methoxyethyl) ribonucleotide
  modified_base 20: mod_base = OTHER; note = Locked nucleic acid
  modified_base 1: mod_base = OTHER; note = 5-methyl cytidine
  modified_base 17..19: mod_base = OTHER; note = 5-methyl cytidine
ctgtaggtatggagaaccct

SEQ ID NO: 886 - DNA, 20 bp, synthetic construct
  source 1..20: mol_type = other DNA
  modified_base 1..20: mod_base = OTHER; note = Phosphorothioate linkage
  modified_base 1..4: mod_base = OTHER; note = 2'-O-(2-methoxyethyl) ribonucleotide
  modified_base 5: mod_base = OTHER; note = Locked nucleic acid
  misc_feature 1..5: note = RNA
  misc_feature 6..15: note = DNA
  misc_feature 16..20: note = RNA
  modified_base 16: mod_base = OTHER; note = Locked nucleic acid
  modified_base 17..20: mod_base = OTHER; note = 2'-O-(2-methoxyethyl) ribonucleotide
  modified_base 4..5: mod_base = OTHER; note = 5-methyl cytidine
  modified_base 7: mod_base = OTHER; note = 5-methyl cytidine
  modified_base 11: mod_base = OTHER; note = 5-methyl cytidine
  modified_base 13: mod_base = OTHER; note = 5-methyl cytidine
  modified_base 15: mod_base = OTHER; note = 5-methyl cytidine
  modified_base 17: mod_base = OTHER; note = 5-methyl cytidine
ggacctctgtctctctctgg

SEQ ID NO: 887 - DNA, 20 bp, synthetic construct
  source 1..20: mol_type = other DNA
  modified_base 1..20: mod_base = OTHER; note = Phosphorothioate linkage
  modified_base 1..2: mod_base = OTHER; note = 2'-O-(2-methoxyethyl) ribonucleotide
  modified_base 3: mod_base = OTHER; note = Locked nucleic acid
  modified_base 4..5: mod_base = OTHER; note = 2'-O-(2-methoxyethyl) ribonucleotide
  misc_feature 1..5: note = RNA
  misc_feature 6..15: note = DNA
  misc_feature 16..20: note = RNA
  modified_base 16..17: mod_base = OTHER; note = 2'-O-(2-methoxyethyl) ribonucleotide
  modified_base 18: mod_base = OTHER; note = Locked nucleic acid
  modified_base 19..20: mod_base = OTHER; note = 2'-O-(2-methoxyethyl) ribonucleotide
  modified_base 4..5: mod_base = OTHER; note = 5-methyl cytidine
  modified_base 7: mod_base = OTHER; note = 5-methyl cytidine
  modified_base 11: mod_base = OTHER; note = 5-methyl cytidine
  modified_base 13: mod_base = OTHER; note = 5-methyl cytidine
  modified_base 15: mod_base = OTHER; note = 5-methyl cytidine
  modified_base 17: mod_base = OTHER; note = 5-methyl cytidine
ggacctctgtctctctctgg

SEQ ID NO: 888 - DNA, 20 bp, synthetic construct
  source 1..20: mol_type = other DNA
  modified_base 1..20: mod_base = OTHER; note = Phosphorothioate linkage
  modified_base 1: mod_base = OTHER; note = Locked nucleic acid
  modified_base 2..5: mod_base = OTHER; note = 2'-O-(2-methoxyethyl) ribonucleotide
  misc_feature 1..5: note = RNA
  misc_feature 6..15: note = DNA
  misc_feature 16..20: note = RNA
  modified_base 16..19: mod_base = OTHER; note = 2'-O-(2-methoxyethyl) ribonucleotide
  modified_base 20: mod_base = OTHER; note = Locked nucleic acid
  modified_base 4..5: mod_base = OTHER; note = 5-methyl cytidine
  modified_base 7: mod_base = OTHER; note = 5-methyl cytidine
  modified_base 11: mod_base = OTHER; note = 5-methyl cytidine
  modified_base 13: mod_base = OTHER; note = 5-methyl cytidine
  modified_base 15: mod_base = OTHER; note = 5-methyl cytidine
  modified_base 17: mod_base = OTHER; note = 5-methyl cytidine
ggacctctgtctctctctgg

SEQ ID NO: 889 - DNA, 20 bp, synthetic construct
  source 1..20: mol_type = other DNA
  modified_base 1..20: mod_base = OTHER; note = Phosphorothioate linkage
  modified_base 1..2: mod_base = OTHER; note = 2'-O-(2-methoxyethyl) ribonucleotide
  modified_base 3: mod_base = OTHER; note = Locked nucleic acid
  modified_base 4: mod_base = OTHER; note = 2'-O-(2-methoxyethyl) ribonucleotide
  modified_base 5: mod_base = OTHER; note = Locked nucleic acid
  misc_feature 1..5: note = RNA
  misc_feature 6..15: note = DNA
  misc_feature 16..20: note = RNA
  modified_base 16: mod_base = OTHER; note = Locked nucleic acid
  modified_base 17: mod_base = OTHER; note = 2'-O-(2-methoxyethyl) ribonucleotide
  modified_base 18: mod_base = OTHER; note = Locked nucleic acid
  modified_base 19..20: mod_base = OTHER; note = 2'-O-(2-methoxyethyl) ribonucleotide
  modified_base 4..5: mod_base = OTHER; note = 5-methyl cytidine
  modified_base 7: mod_base = OTHER; note = 5-methyl cytidine
  modified_base 11: mod_base = OTHER; note = 5-methyl cytidine
  modified_base 13: mod_base = OTHER; note = 5-methyl cytidine
  modified_base 15: mod_base = OTHER; note = 5-methyl cytidine
  modified_base 17: mod_base = OTHER; note = 5-methyl cytidine
ggacctctgtctctctctgg

SEQ ID NO: 890 - DNA, 20 bp, synthetic construct
  source 1..20: mol_type = other DNA
  modified_base 1..20: mod_base = OTHER; note = Phosphorothioate linkage
  modified_base 1: mod_base = OTHER; note = Locked nucleic acid
  modified_base 2: mod_base = OTHER; note = 2'-O-(2-methoxyethyl) ribonucleotide
  modified_base 3: mod_base = OTHER; note = Locked nucleic acid
  modified_base 4..5: mod_base = OTHER; note = 2'-O-(2-methoxyethyl) ribonucleotide
  misc_feature 1..5: note = RNA
  misc_feature 6..15: note = DNA
  misc_feature 16..20: note = RNA
  modified_base 16..17: mod_base = OTHER; note = 2'-O-(2-methoxyethyl) ribonucleotide
  modified_base 18: mod_base = OTHER; note = Locked nucleic acid
  modified_base 19: mod_base = OTHER; note = 2'-O-(2-methoxyethyl) ribonucleotide
  modified_base 20: mod_base = OTHER; note = Locked nucleic acid
  modified_base 4..5: mod_base = OTHER; note = 5-methyl cytidine
  modified_base 7: mod_base = OTHER; note = 5-methyl cytidine
  modified_base 11: mod_base = OTHER; note = 5-methyl cytidine
  modified_base 13: mod_base = OTHER; note = 5-methyl cytidine
  modified_base 15: mod_base = OTHER; note = 5-methyl cytidine
  modified_base 17: mod_base = OTHER; note = 5-methyl cytidine
ggacctctgtctctctctgg

SEQ ID NO: 891 - DNA, 20 bp, synthetic construct
  source 1..20: mol_type = other DNA
  modified_base 1..20: mod_base = OTHER; note = Phosphorothioate linkage
  modified_base 1: mod_base = OTHER; note = Locked nucleic acid
  modified_base 2: mod_base = OTHER; note = 2'-O-(2-methoxyethyl) ribonucleotide
  modified_base 3: mod_base = OTHER; note = Locked nucleic acid
  modified_base 4: mod_base = OTHER; note = 2'-O-(2-methoxyethyl) ribonucleotide
  modified_base 5: mod_base = OTHER; note = Locked nucleic acid
  misc_feature 1..5: note = RNA
  misc_feature 6..15: note = DNA
  misc_feature 16..20: note = RNA
  modified_base 16: mod_base = OTHER; note = Locked nucleic acid
  modified_base 17: mod_base = OTHER; note = 2'-O-(2-methoxyethyl) ribonucleotide
  modified_base 18: mod_base = OTHER; note = Locked nucleic acid
  modified_base 19: mod_base = OTHER; note = 2'-O-(2-methoxyethyl) ribonucleotide
  modified_base 20: mod_base = OTHER; note = Locked nucleic acid
  modified_base 4..5: mod_base = OTHER; note = 5-methyl cytidine
  modified_base 7: mod_base = OTHER; note = 5-methyl cytidine
  modified_base 11: mod_base = OTHER; note = 5-methyl cytidine
  modified_base 13: mod_base = OTHER; note = 5-methyl cytidine
  modified_base 15: mod_base = OTHER; note = 5-methyl cytidine
  modified_base 17: mod_base = OTHER; note = 5-methyl cytidine
ggacctctgtctctctctgg

SEQ ID NO: 892 - RNA, 20 nt, synthetic construct
  source 1..20: mol_type = other RNA
  modified_base 1..20: mod_base = OTHER; note = Phosphorothioate linkage
  modified_base 1..20: mod_base = OTHER; note = 2'-O-(2-methoxyethyl) ribonucleotide
  modified_base 3: mod_base = OTHER; note = 5-methyl cytidine
  modified_base 5: mod_base = OTHER; note = 5-methyl cytidine
  modified_base 11: mod_base = OTHER; note = 5-methyl cytidine
  modified_base 13..14: mod_base = OTHER; note = 5-methyl cytidine
  modified_base 16..17: mod_base = OTHER; note = 5-methyl cytidine
  modified_base 19..20: mod_base = OTHER; note = 5-methyl cytidine
ggctcttattctcctcctcc

SEQ ID NO: 893 - RNA, 20 nt, synthetic construct
  source 1..20: mol_type = other RNA
  modified_base 1..20: mod_base = OTHER; note = Phosphorothioate linkage
  modified_base 1..20: mod_base = OTHER; note = 2'-O-(2-methoxyethyl) ribonucleotide
  modified_base 5: mod_base = OTHER; note = 5-methyl cytidine
  modified_base 7: mod_base = OTHER; note = 5-methyl cytidine
  modified_base 13: mod_base = OTHER; note = 5-methyl cytidine
  modified_base 15..16: mod_base = OTHER; note = 5-methyl cytidine
  modified_base 18..19: mod_base = OTHER; note = 5-methyl cytidine
ttggctcttattctcctcct

SEQ ID NO: 894 - RNA, 20 nt, synthetic construct
  source 1..20: mol_type = other RNA
  modified_base 1..20: mod_base = OTHER; note = Phosphorothioate linkage
  modified_base 1..20: mod_base = OTHER; note = 2'-O-(2-methoxyethyl) ribonucleotide
  modified_base 1..2: mod_base = OTHER; note = 5-methyl cytidine
  modified_base 8: mod_base = OTHER; note = 5-methyl cytidine
  modified_base 10: mod_base = OTHER; note = 5-methyl cytidine
  modified_base 16: mod_base = OTHER; note = 5-methyl cytidine
  modified_base 18..19: mod_base = OTHER; note = 5-methyl cytidine
ccgttggctcttattctcct

SEQ ID NO: 895 - RNA, 20 nt, synthetic construct
  source 1..20: mol_type = other RNA
  modified_base 1..20: mod_base = OTHER; note = Phosphorothioate linkage
  modified_base 1..20: mod_base = OTHER; note = 2'-O-(2-methoxyethyl) ribonucleotide
  modified_base 3..4: mod_base = OTHER; note = 5-methyl cytidine
  modified_base 10: mod_base = OTHER; note = 5-methyl cytidine
  modified_base 12: mod_base = OTHER; note = 5-methyl cytidine
  modified_base 18: mod_base = OTHER; note = 5-methyl cytidine
  modified_base 20: mod_base = OTHER; note = 5-methyl cytidine
tgccgttggctcttattctc

SEQ ID NO: 896 - RNA, 20 nt, synthetic construct
  source 1..20: mol_type = other RNA
  modified_base 1..20: mod_base = OTHER; note = Phosphorothioate linkage
  modified_base 1..20: mod_base = OTHER; note = 2'-O-(2-methoxyethyl) ribonucleotide
  modified_base 2: mod_base = OTHER; note = 5-methyl cytidine
  modified_base 5..6: mod_base = OTHER; note = 5-methyl cytidine
  modified_base 12: mod_base = OTHER; note = 5-methyl cytidine
  modified_base 14: mod_base = OTHER; note = 5-methyl cytidine
  modified_base 20: mod_base = OTHER; note = 5-methyl cytidine
gctgccgttggctcttattc

SEQ ID NO: 897 - RNA, 20 nt, synthetic construct
  source 1..20: mol_type = other RNA
  modified_base 1..20: mod_base = OTHER; note = Phosphorothioate linkage
  modified_base 1..20: mod_base = OTHER; note = 2'-O-(2-methoxyethyl) ribonucleotide
  modified_base 1: mod_base = OTHER; note = 5-methyl cytidine
  modified_base 4: mod_base = OTHER; note = 5-methyl cytidine
  modified_base 7..8: mod_base = OTHER; note = 5-methyl cytidine
  modified_base 14: mod_base = OTHER; note = 5-methyl cytidine
  modified_base 16: mod_base = OTHER; note = 5-methyl cytidine
ctgctgccgttggctcttat

SEQ ID NO: 898 - RNA, 20 nt, synthetic construct
  source 1..20: mol_type = other RNA
  modified_base 1..20: mod_base = OTHER; note = Phosphorothioate linkage
  modified_base 1..20: mod_base = OTHER; note = 2'-O-(2-methoxyethyl) ribonucleotide
  modified_base 1: mod_base = OTHER; note = 5-methyl cytidine
  modified_base 3: mod_base = OTHER; note = 5-methyl cytidine
  modified_base 6: mod_base = OTHER; note = 5-methyl cytidine
  modified_base 9..10: mod_base = OTHER; note = 5-methyl cytidine
  modified_base 16: mod_base = OTHER; note = 5-methyl cytidine
  modified_base 18: mod_base = OTHER; note = 5-methyl cytidine
cgctgctgccgttggctctt

SEQ ID NO: 899 - DNA, 20 bp, synthetic construct
  source 1..20: mol_type = other DNA
  modified_base 1..20: mod_base = OTHER; note = Phosphorothioate linkage
  modified_base 1..5: mod_base = OTHER; note = 2'-O-(2-methoxyethyl) ribonucleotide
  misc_feature 1..5: note = RNA
  misc_feature 6..15: note = DNA
  misc_feature 16..20: note = RNA
  modified_base 16..20: mod_base = OTHER; note = 2'-O-(2-methoxyethyl) ribonucleotide
  modified_base 3: mod_base = OTHER; note = 5-methyl cytidine
  modified_base 5: mod_base = OTHER; note = 5-methyl cytidine
  modified_base 11: mod_base = OTHER; note = 5-methyl cytidine
  modified_base 13..14: mod_base = OTHER; note = 5-methyl cytidine
  modified_base 16..17: mod_base = OTHER; note = 5-methyl cytidine
  modified_base 19..20: mod_base = OTHER; note = 5-methyl cytidine
ggctcttattctcctcctcc

SEQ ID NO: 900 - DNA, 20 bp, synthetic construct
  source 1..20: mol_type = other DNA
  modified_base 1..20: mod_base = OTHER; note = Phosphorothioate linkage
  modified_base 1..5: mod_base = OTHER; note = 2'-O-(2-methoxyethyl) ribonucleotide
  misc_feature 1..5: note = RNA
  misc_feature 6..15: note = DNA
  misc_feature 16..20: note = RNA
  modified_base 16..20: mod_base = OTHER; note = 2'-O-(2-methoxyethyl) ribonucleotide
  modified_base 5: mod_base = OTHER; note = 5-methyl cytidine
  modified_base 7: mod_base = OTHER; note = 5-methyl cytidine
  modified_base 13: mod_base = OTHER; note = 5-methyl cytidine
  modified_base 15..16: mod_base = OTHER; note = 5-methyl cytidine
  modified_base 18..19: mod_base = OTHER; note = 5-methyl cytidine
ttggctcttattctcctcct

SEQ ID NO: 901 - DNA, 20 bp, synthetic construct
  source 1..20: mol_type = other DNA
  modified_base 1..20: mod_base = OTHER; note = Phosphorothioate linkage
  modified_base 1..5: mod_base = OTHER; note = 2'-O-(2-methoxyethyl) ribonucleotide
  misc_feature 1..5: note = RNA
  misc_feature 6..15: note = DNA
  misc_feature 16..20: note = RNA
  modified_base 16..20: mod_base = OTHER; note = 2'-O-(2-methoxyethyl) ribonucleotide
  modified_base 1..2: mod_base = OTHER; note = 5-methyl cytidine
  modified_base 8: mod_base = OTHER; note = 5-methyl cytidine
  modified_base 10: mod_base = OTHER; note = 5-methyl cytidine
  modified_base 16: mod_base = OTHER; note = 5-methyl cytidine
  modified_base 18..19: mod_base = OTHER; note = 5-methyl cytidine
ccgttggctcttattctcct

SEQ ID NO: 902 - DNA, 20 bp, synthetic construct
  source 1..20: mol_type = other DNA
  modified_base 1..20: mod_base = OTHER; note = Phosphorothioate linkage
  modified_base 1..5: mod_base = OTHER; note = 2'-O-(2-methoxyethyl) ribonucleotide
  misc_feature 1..5: note = RNA
  misc_feature 6..15: note = DNA
  misc_feature 16..20: note = RNA
  modified_base 16..20: mod_base = OTHER; note = 2'-O-(2-methoxyethyl) ribonucleotide
  modified_base 3..4: mod_base = OTHER; note = 5-methyl cytidine
  modified_base 10: mod_base = OTHER; note = 5-methyl cytidine
  modified_base 12: mod_base = OTHER; note = 5-methyl cytidine
  modified_base 18: mod_base = OTHER; note = 5-methyl cytidine
  modified_base 20: mod_base = OTHER; note = 5-methyl cytidine
tgccgttggctcttattctc

SEQ ID NO: 903 - DNA, 20 bp, synthetic construct
  source 1..20: mol_type = other DNA
  modified_base 1..20: mod_base = OTHER; note = Phosphorothioate linkage
  modified_base 1..5: mod_base = OTHER; note = 2'-O-(2-methoxyethyl) ribonucleotide
  misc_feature 1..5: note = RNA
  misc_feature 6..15: note = DNA
  misc_feature 16..20: note = RNA
  modified_base 16..20: mod_base = OTHER; note = 2'-O-(2-methoxyethyl) ribonucleotide
  modified_base 2: mod_base = OTHER; note = 5-methyl cytidine
  modified_base 5..6: mod_base = OTHER; note = 5-methyl cytidine
  modified_base 12: mod_base = OTHER; note = 5-methyl cytidine
  modified_base 14: mod_base = OTHER; note = 5-methyl cytidine
  modified_base 20: mod_base = OTHER; note = 5-methyl cytidine
gctgccgttggctcttattc

SEQ ID NO: 904 - DNA, 20 bp, synthetic construct
  source 1..20: mol_type = other DNA
  modified_base 1..20: mod_base = OTHER; note = Phosphorothioate linkage
  modified_base 1..5: mod_base = OTHER; note = 2'-O-(2-methoxyethyl) ribonucleotide
  misc_feature 1..5: note = RNA
  misc_feature 6..15: note = DNA
  misc_feature 16..20: note = RNA
  modified_base 16..20: mod_base = OTHER; note = 2'-O-(2-methoxyethyl) ribonucleotide
  modified_base 1: mod_base = OTHER; note = 5-methyl cytidine
  modified_base 4: mod_base = OTHER; note = 5-methyl cytidine
  modified_base 7..8: mod_base = OTHER; note = 5-methyl cytidine
  modified_base 14: mod_base = OTHER; note = 5-methyl cytidine
  modified_base 16: mod_base = OTHER; note = 5-methyl cytidine
ctgctgccgttggctcttat

SEQ ID NO: 905 - DNA, 20 bp, synthetic construct
  source 1..20: mol_type = other DNA
  modified_base 1..20: mod_base = OTHER; note = Phosphorothioate linkage
  modified_base 1..5: mod_base = OTHER; note = 2'-O-(2-methoxyethyl) ribonucleotide
  misc_feature 1..5: note = RNA
  misc_feature 6..15: note = DNA
  misc_feature 16..20: note = RNA
  modified_base 16..20: mod_base = OTHER; note = 2'-O-(2-methoxyethyl) ribonucleotide
  modified_base 1: mod_base = OTHER; note = 5-methyl cytidine
  modified_base 3: mod_base = OTHER; note = 5-methyl cytidine
  modified_base 6: mod_base = OTHER; note = 5-methyl cytidine
  modified_base 9..10: mod_base = OTHER; note = 5-methyl cytidine
  modified_base 16: mod_base = OTHER; note = 5-methyl cytidine
  modified_base 18: mod_base = OTHER; note = 5-methyl cytidine
cgctgctgccgttggctctt

SEQ ID NO: 906 - DNA, 20 bp, synthetic construct
  source 1..20: mol_type = other DNA
  modified_base 1..20: mod_base = OTHER; note = Phosphorothioate linkage
  modified_base 1..5: mod_base = OTHER; note = 2'-O-(2-methoxyethyl) ribonucleotide
  misc_feature 1..5: note = RNA
  misc_feature 6..15: note = DNA
  misc_feature 16..20: note = RNA
  modified_base 16..20: mod_base = OTHER; note = 2'-O-(2-methoxyethyl) ribonucleotide
  modified_base 1: mod_base = OTHER; note = 5-methyl cytidine
  modified_base 18: mod_base = OTHER; note = 5-methyl cytidine
ctggtgtgtttttgagtcag

SEQ ID NO: 907 - DNA, 20 bp, synthetic construct
  source 1..20: mol_type = other DNA
  modified_base 1..20: mod_base = OTHER; note = Phosphorothioate linkage
  modified_base 1..5: mod_base = OTHER; note = 2'-O-(2-methoxyethyl) ribonucleotide
  misc_feature 1..5: note = RNA
  misc_feature 6..15: note = DNA
  misc_feature 16..20: note = RNA
  modified_base 16..20: mod_base = OTHER; note = 2'-O-(2-methoxyethyl) ribonucleotide
  modified_base 2: mod_base = OTHER; note = 5-methyl cytidine
  modified_base 19: mod_base = OTHER; note = 5-methyl cytidine
tctggtgtgtttttgagtca

SEQ ID NO: 908 - DNA, 20 bp, synthetic construct
  source 1..20: mol_type = other DNA
  modified_base 1..20: mod_base = OTHER; note = Phosphorothioate linkage
  modified_base 1..5: mod_base = OTHER; note = 2'-O-(2-methoxyethyl) ribonucleotide
  misc_feature 1..5: note = RNA
  misc_feature 6..15: note = DNA
  misc_feature 16..20: note = RNA
  modified_base 16..20: mod_base = OTHER; note = 2'-O-(2-methoxyethyl) ribonucleotide
  modified_base 2: mod_base = OTHER; note = 5-methyl cytidine
  modified_base 4: mod_base = OTHER; note = 5-methyl cytidine
tctctggtgtgtttttgagt

SEQ ID NO: 909 - DNA, 20 bp, synthetic construct
  source 1..20: mol_type = other DNA
  modified_base 1..20: mod_base = OTHER; note = Phosphorothioate linkage
  modified_base 1..5: mod_base = OTHER; note = 2'-O-(2-methoxyethyl) ribonucleotide
  misc_feature 1..5: note = RNA
  misc_feature 6..15: note = DNA
  misc_feature 16..20: note = RNA
  modified_base 16..20: mod_base = OTHER; note = 2'-O-(2-methoxyethyl) ribonucleotide
  modified_base 3: mod_base = OTHER; note = 5-methyl cytidine
  modified_base 11..12: mod_base = OTHER; note = 5-methyl cytidine
  modified_base 14: mod_base = OTHER; note = 5-methyl cytidine
  modified_base 18: mod_base = OTHER; note = 5-methyl cytidine
  modified_base 20: mod_base = OTHER; note = 5-methyl cytidine
atctttaggacctctgtctc

SEQ ID NO: 910 - DNA, 20 bp, synthetic construct
  source 1..20: mol_type = other DNA
  modified_base 1..20: mod_base = OTHER; note = Phosphorothioate linkage
  modified_base 1..5: mod_base = OTHER; note = 2'-O-(2-methoxyethyl) ribonucleotide
  misc_feature 1..5: note = RNA
  misc_feature 6..15: note = DNA
  misc_feature 16..20: note = RNA
  modified_base 16..20: mod_base = OTHER; note = 2'-O-(2-methoxyethyl) ribonucleotide
  modified_base 4: mod_base = OTHER; note = 5-methyl cytidine
  modified_base 7: mod_base = OTHER; note = 5-methyl cytidine
  modified_base 10: mod_base = OTHER; note = 5-methyl cytidine
  modified_base 18..19: mod_base = OTHER; note = 5-methyl cytidine
ggtctgcatctttaggacct

SEQ ID NO: 911 - DNA, 20 bp, synthetic construct
  source 1..20: mol_type = other DNA
  modified_base 1..20: mod_base = OTHER; note = Phosphorothioate linkage
  modified_base 1..5: mod_base = OTHER; note = 2'-O-(2-methoxyethyl) ribonucleotide
  misc_feature 1..5: note = RNA
  misc_feature 6..15: note = DNA
  misc_feature 16..20: note = RNA
  modified_base 16..20: mod_base = OTHER; note = 2'-O-(2-methoxyethyl) ribonucleotide
  modified_base 5: mod_base = OTHER; note = 5-methyl cytidine
  modified_base 8: mod_base = OTHER; note = 5-methyl cytidine
  modified_base 11: mod_base = OTHER; note = 5-methyl cytidine
  modified_base 19..20: mod_base = OTHER; note = 5-methyl cytidine
gggtctgcatctttaggacc

SEQ ID NO: 912 - DNA, 20 bp, synthetic construct
  source 1..20: mol_type = other DNA
  modified_base 1..20: mod_base = OTHER; note = Phosphorothioate linkage
  modified_base 1..5: mod_base = OTHER; note = 2'-O-(2-methoxyethyl) ribonucleotide
  misc_feature 1..5: note = RNA
  misc_feature 6..15: note = DNA
  misc_feature 16..20: note = RNA
  modified_base 16..20: mod_base = OTHER; note = 2'-O-(2-methoxyethyl) ribonucleotide
  modified_base 2: mod_base = OTHER; note = 5-methyl cytidine
  modified_base 9: mod_base = OTHER; note = 5-methyl cytidine
  modified_base 11: mod_base = OTHER; note = 5-methyl cytidine
  modified_base 13: mod_base = OTHER; note = 5-methyl cytidine
  modified_base 17: mod_base = OTHER; note = 5-methyl cytidine
  modified_base 19: mod_base = OTHER; note = 5-methyl cytidine
tctagggtctctctgtctca

SEQ ID NO: 913 - DNA, 20 bp, synthetic construct
  source 1..20: mol_type = other DNA
  modified_base 1..20: mod_base = OTHER; note = Phosphorothioate linkage
  modified_base 1..5: mod_base = OTHER; note = 2'-O-(2-methoxyethyl) ribonucleotide
  misc_feature 1..5: note = RNA
  misc_feature 6..15: note = DNA
  misc_feature 16..20: note = RNA
  modified_base 16..20: mod_base = OTHER; note = 2'-O-(2-methoxyethyl) ribonucleotide
  modified_base 5: mod_base = OTHER; note = 5-methyl cytidine
  modified_base 12: mod_base = OTHER; note = 5-methyl cytidine
  modified_base 14: mod_base = OTHER; note = 5-methyl cytidine
  modified_base 16: mod_base = OTHER; note = 5-methyl cytidine
  modified_base 20: mod_base = OTHER; note = 5-methyl cytidine
gggtctagggtctctctgtc

SEQ ID NO: 914 - DNA, 20 bp, synthetic construct
  source 1..20: mol_type = other DNA
  modified_base 1..20: mod_base = OTHER; note = Phosphorothioate linkage
  modified_base 1..5: mod_base = OTHER; note = 2'-O-(2-methoxyethyl) ribonucleotide
  misc_feature 1..5: note = RNA
  misc_feature 6..15: note = DNA
  misc_feature 16..20: note = RNA
  modified_base 16..20: mod_base = OTHER; note = 2'-O-(2-methoxyethyl) ribonucleotide
  modified_base 7: mod_base = OTHER; note = 5-methyl cytidine
  modified_base 14: mod_base = OTHER; note = 5-methyl cytidine
  modified_base 16: mod_base = OTHER; note = 5-methyl cytidine
  modified_base 18: mod_base = OTHER; note = 5-methyl cytidine
gtgggtctagggtctctctg

SEQ ID NO: 915 - DNA, 20 bp, synthetic construct
  source 1..20: mol_type = other DNA
  modified_base 1..20: mod_base = OTHER; note = Phosphorothioate linkage
  modified_base 1..5: mod_base = OTHER; note = 2'-O-(2-methoxyethyl) ribonucleotide
  misc_feature 1..5: note = RNA
  misc_feature 6..15: note = DNA
  misc_feature 16..20: note = RNA
  modified_base 16..20: mod_base = OTHER; note = 2'-O-(2-methoxyethyl) ribonucleotide
  modified_base 2: mod_base = OTHER; note = 5-methyl cytidine
  modified_base 10: mod_base = OTHER; note = 5-methyl cytidine
  modified_base 17: mod_base = OTHER; note = 5-methyl cytidine
  modified_base 19: mod_base = OTHER; note = 5-methyl cytidine
tctgtgggtctagggtctct

SEQ ID NO: 916 - DNA, 20 bp, synthetic construct
  source 1..20: mol_type = other DNA
  modified_base 1..20: mod_base = OTHER; note = Phosphorothioate linkage
  modified_base 1..5: mod_base = OTHER; note = 2'-O-(2-methoxyethyl) ribonucleotide
  misc_feature 1..5: note = RNA
  misc_feature 6..15: note = DNA
  misc_feature 16..20: note = RNA
  modified_base 16..20: mod_base = OTHER; note = 2'-O-(2-methoxyethyl) ribonucleotide
  modified_base 2: mod_base = OTHER; note = 5-methyl cytidine
  modified_base 4: mod_base = OTHER; note = 5-methyl cytidine
  modified_base 12: mod_base = OTHER; note = 5-methyl cytidine
  modified_base 19: mod_base = OTHER; note = 5-methyl cytidine
tctctgtgggtctagggtct

SEQ ID NO: 917 - DNA, 20 bp, synthetic construct
  source 1..20: mol_type = other DNA
  modified_base 1..20: mod_base = OTHER; note = Phosphorothioate linkage
  modified_base 1..5: mod_base = OTHER; note = 2'-O-(2-methoxyethyl) ribonucleotide
  misc_feature 1..5: note = RNA
  misc_feature 6..15: note = DNA
  misc_feature 16..20: note = RNA
  modified_base 16..20: mod_base = OTHER; note = 2'-O-(2-methoxyethyl) ribonucleotide
  modified_base 4: mod_base = OTHER; note = 5-methyl cytidine
  modified_base 6: mod_base = OTHER; note = 5-methyl cytidine
  modified_base 14: mod_base = OTHER; note = 5-methyl cytidine
tttctctgtgggtctagggt

SEQ ID NO: 918 - DNA, 20 bp, synthetic construct
  source 1..20: mol_type = other DNA
  modified_base 1..20: mod_base = OTHER; note = Phosphorothioate linkage
  modified_base 1..5: mod_base = OTHER; note = 2'-O-(2-methoxyethyl) ribonucleotide
  misc_feature 1..5: note = RNA
  misc_feature 6..15: note = DNA
  misc_feature 16..20: note = RNA
  modified_base 16..20: mod_base = OTHER; note = 2'-O-(2-methoxyethyl) ribonucleotide
  modified_base 9: mod_base = OTHER; note = 5-methyl cytidine
  modified_base 13: mod_base = OTHER; note = 5-methyl cytidine
  modified_base 15: mod_base = OTHER; note = 5-methyl cytidine
tgaagtatctttctctgtgg

SEQ ID NO: 919 - DNA, 20 bp, synthetic construct
  source 1..20: mol_type = other DNA
  modified_base 1..20: mod_base = OTHER; note = Phosphorothioate linkage
  modified_base 1..5: mod_base = OTHER; note = 2'-O-(2-methoxyethyl) ribonucleotide
  misc_feature 1..5: note = RNA
  misc_feature 6..15: note = DNA
  misc_feature 16..20: note = RNA
  modified_base 16..20: mod_base = OTHER; note = 2'-O-(2-methoxyethyl) ribonucleotide
  modified_base 11: mod_base = OTHER; note = 5-methyl cytidine
  modified_base 15: mod_base = OTHER; note = 5-methyl cytidine
  modified_base 17: mod_base = OTHER; note = 5-methyl cytidine
ggtgaagtatctttctctgt

SEQ ID NO: 920 - DNA, 20 bp, synthetic construct
  source 1..20: mol_type = other DNA
  modified_base 1..20: mod_base = OTHER; note = Phosphorothioate linkage
  modified_base 1..5: mod_base = OTHER; note = 2'-O-(2-methoxyethyl) ribonucleotide
  misc_feature 1..5: note = RNA
  misc_feature 6..15: note = DNA
  misc_feature 16..20: note = RNA
  modified_base 16..20: mod_base = OTHER; note = 2'-O-(2-methoxyethyl) ribonucleotide
  modified_base 13: mod_base = OTHER; note = 5-methyl cytidine
  modified_base 17: mod_base = OTHER; note = 5-methyl cytidine
  modified_base 19: mod_base = OTHER; note = 5-methyl cytidine
gtggtgaagtatctttctct

SEQ ID NO: 921 - DNA, 20 bp, synthetic construct
  source 1..20: mol_type = other DNA
  modified_base 1..20: mod_base = OTHER; note = Phosphorothioate linkage
  modified_base 1..5: mod_base = OTHER; note = 2'-O-(2-methoxyethyl) ribonucleotide
  misc_feature 1..5: note = RNA
  misc_feature 6..15: note = DNA
  misc_feature 16..20: note = RNA
  modified_base 16..20: mod_base = OTHER; note = 2'-O-(2-methoxyethyl) ribonucleotide
  modified_base 2: mod_base = OTHER; note = 5-methyl cytidine
  modified_base 9..12: mod_base = OTHER; note = 5-methyl cytidine
  modified_base 14: mod_base = OTHER; note = 5-methyl cytidine
tcaaattaccccacagtggg

SEQ ID NO: 922 - DNA, 20 bp, synthetic construct
  source 1..20: mol_type = other DNA
  modified_base 1..20: mod_base = OTHER; note = Phosphorothioate linkage
  modified_base 1..5: mod_base = OTHER; note = 2'-O-(2-methoxyethyl) ribonucleotide
  misc_feature 1..5: note = RNA
  misc_feature 6..15: note = DNA
  misc_feature 16..20: note = RNA
  modified_base 16..20: mod_base = OTHER; note = 2'-O-(2-methoxyethyl) ribonucleotide
  modified_base 2: mod_base = OTHER; note = 5-methyl cytidine
  modified_base 4: mod_base = OTHER; note = 5-methyl cytidine
  modified_base 11..14: mod_base = OTHER; note = 5-methyl cytidine
  modified_base 16: mod_base = OTHER; note = 5-methyl cytidine
tctcaaattaccccacagtg

SEQ ID NO: 923 - DNA, 20 bp, synthetic construct
  source 1..20: mol_type = other DNA
  modified_base 1..20: mod_base = OTHER; note = Phosphorothioate linkage
  modified_base 1..5: mod_base = OTHER; note = 2'-O-(2-methoxyethyl) ribonucleotide
  misc_feature 1..5: note = RNA
  misc_feature 6..15: note = DNA
  misc_feature 16..20: note = RNA
  modified_base 16..20: mod_base = OTHER; note = 2'-O-(2-methoxyethyl) ribonucleotide
  modified_base 4: mod_base = OTHER; note = 5-methyl cytidine
  modified_base 6: mod_base = OTHER; note = 5-methyl cytidine
  modified_base 13..16: mod_base = OTHER; note = 5-methyl cytidine
  modified_base 18: mod_base = OTHER; note = 5-methyl cytidine
tgtctcaaattaccccacag

SEQ ID NO: 924 - DNA, 20 bp, synthetic construct
  source 1..20: mol_type = other DNA
  modified_base 1..20: mod_base = OTHER; note = Phosphorothioate linkage
  modified_base 1..5: mod_base = OTHER; note = 2'-O-(2-methoxyethyl) ribonucleotide
  misc_feature 1..5: note = RNA
  misc_feature 6..15: note = DNA
  misc_feature 16..20: note = RNA
  modified_base 16..20: mod_base = OTHER; note = 2'-O-(2-methoxyethyl) ribonucleotide
  modified_base 6: mod_base = OTHER; note = 5-methyl cytidine
  modified_base 8: mod_base = OTHER; note = 5-methyl cytidine
  modified_base 15..18: mod_base = OTHER; note = 5-methyl cytidine
  modified_base 20: mod_base = OTHER; note = 5-methyl cytidine
tgtgtctcaaattaccccac

SEQ ID NO: 925 - DNA, 20 bp, synthetic construct
  source 1..20: mol_type = other DNA
  modified_base 1..20: mod_base = OTHER; note = Phosphorothioate linkage
  modified_base 1..5: mod_base = OTHER; note = 2'-O-(2-methoxyethyl) ribonucleotide
  misc_feature 1..5: note = RNA
  misc_feature 6..15: note = DNA
  misc_feature 16..20: note = RNA
  modified_base 16..20: mod_base = OTHER; note = 2'-O-(2-methoxyethyl) ribonucleotide
  modified_base 1..2: mod_base = OTHER; note = 5-methyl cytidine
  modified_base 8: mod_base = OTHER; note = 5-methyl cytidine
  modified_base 10: mod_base = OTHER; note = 5-methyl cytidine
  modified_base 17..20: mod_base = OTHER; note = 5-methyl cytidine
cctgtgtctcaaattacccc

SEQ ID NO: 926 - DNA, 20 bp, synthetic construct
  source 1..20: mol_type = other DNA
  modified_base 1..20: mod_base = OTHER; note = Phosphorothioate linkage
  modified_base 1..5: mod_base = OTHER; note = 2'-O-(2-methoxyethyl) ribonucleotide
  misc_feature 1..5: note = RNA
  misc_feature 6..15: note = DNA
  misc_feature 16..20: note = RNA
  modified_base 16..20: mod_base = OTHER; note = 2'-O-(2-methoxyethyl) ribonucleotide
  modified_base 2..4: mod_base = OTHER; note = 5-methyl cytidine
  modified_base 10: mod_base = OTHER; note = 5-methyl cytidine
  modified_base 12: mod_base = OTHER; note = 5-methyl cytidine
  modified_base 19..20: mod_base = OTHER; note = 5-methyl cytidine
gccctgtgtctcaaattacc

SEQ ID NO: 927 - DNA, 20 bp, synthetic construct
  source 1..20: mol_type = other DNA
  modified_base 1..20: mod_base = OTHER; note = Phosphorothioate linkage
  modified_base 1..5: mod_base = OTHER; note = 2'-O-(2-methoxyethyl) ribonucleotide
  misc_feature 1..5: note = RNA
  misc_feature 6..15: note = DNA
  misc_feature 16..20: note = RNA
  modified_base 16..20: mod_base = OTHER; note = 2'-O-(2-methoxyethyl) ribonucleotide
  modified_base 6..8: mod_base = OTHER; note = 5-methyl cytidine
  modified_base 14: mod_base = OTHER; note = 5-methyl cytidine
  modified_base 16: mod_base = OTHER; note = 5-methyl cytidine
tttggccctgtgtctcaaat

SEQ ID NO: 928 - DNA, 20 bp, synthetic construct
  source 1..20: mol_type = other DNA
  modified_base 1..20: mod_base = OTHER; note = Phosphorothioate linkage
  modified_base 1..5: mod_base = OTHER; note = 2'-O-(2-methoxyethyl) ribonucleotide
  misc_feature 1..5: note = RNA
  misc_feature 6..15: note = DNA
  misc_feature 16..20: note = RNA
  modified_base 16..20: mod_base = OTHER; note = 2'-O-(2-methoxyethyl) ribonucleotide
  modified_base 8..10: mod_base = OTHER; note = 5-methyl cytidine
  modified_base 16: mod_base = OTHER; note = 5-methyl cytidine
  modified_base 18: mod_base = OTHER; note = 5-methyl cytidine
attttggccctgtgtctcaa

SEQ ID NO: 929 - DNA, 20 bp, synthetic construct
  source 1..20: mol_type = other DNA
  modified_base 1..20: mod_base = OTHER; note = Phosphorothioate linkage
  modified_base 1..5: mod_base = OTHER; note = 2'-O-(2-methoxyethyl) ribonucleotide
  misc_feature 1..5: note = RNA
  misc_feature 6..15: note = DNA
  misc_feature 16..20: note = RNA
  modified_base 16..20: mod_base = OTHER; note = 2'-O-(2-methoxyethyl) ribonucleotide
  modified_base 2: mod_base = OTHER; note = 5-methyl cytidine
  modified_base 13..15: mod_base = OTHER; note = 5-methyl cytidine
tctagattttggccctgtgt

SEQ ID NO: 930 - DNA, 20 bp, synthetic construct
  source 1..20: mol_type = other DNA
  modified_base 1..20: mod_base = OTHER; note = Phosphorothioate linkage
  modified_base 1..5: mod_base = OTHER; note = 2'-O-(2-methoxyethyl) ribonucleotide
  misc_feature 1..5: note = RNA
  misc_feature 6..15: note = DNA
  misc_feature 16..20: note = RNA
  modified_base 16..20: mod_base = OTHER; note = 2'-O-(2-methoxyethyl) ribonucleotide
  modified_base 1: mod_base = OTHER; note = 5-methyl cytidine
  modified_base 3: mod_base = OTHER; note = 5-methyl cytidine
  modified_base 14..16: mod_base = OTHER; note = 5-methyl cytidine
ctctagattttggccctgtg

SEQ ID NO: 931 - DNA, 20 bp, synthetic construct
  source 1..20: mol_type = other DNA
  modified_base 1..20: mod_base = OTHER; note = Phosphorothioate linkage
  modified_base 1..5: mod_base = OTHER; note = 2'-O-(2-methoxyethyl) ribonucleotide
  misc_feature 1..5: note = RNA
  misc_feature 6..15: note = DNA
  misc_feature 16..20: note = RNA
  modified_base 16..20: mod_base = OTHER; note = 2'-O-(2-methoxyethyl) ribonucleotide
  modified_base 2..3: mod_base = OTHER; note = 5-methyl cytidine
  modified_base 5: mod_base = OTHER; note = 5-methyl cytidine
  modified_base 16..18: mod_base = OTHER; note = 5-methyl cytidine
tcctctagattttggccctg

SEQ ID NO: 932 - DNA, 20 bp, synthetic construct
  source 1..20: mol_type = other DNA
  modified_base 1..20: mod_base = OTHER; note = Phosphorothioate linkage
  modified_base 1..5: mod_base = OTHER; note = 2'-O-(2-methoxyethyl) ribonucleotide
  misc_feature 1..5: note = RNA
  misc_feature 6..15: note = DNA
  misc_feature 16..20: note = RNA
  modified_base 16..20: mod_base = OTHER; note = 2'-O-(2-methoxyethyl) ribonucleotide
  modified_base 5..6: mod_base = OTHER; note = 5-methyl cytidine
  modified_base 8: mod_base = OTHER; note = 5-methyl cytidine
  modified_base 19..20: mod_base = OTHER; note = 5-methyl cytidine
ttttcctctagattttggcc

SEQ ID NO: 933 - DNA, 20 bp, synthetic construct
  source 1..20: mol_type = other DNA
  modified_base 1..20: mod_base = OTHER; note = Phosphorothioate linkage
  modified_base 1..5: mod_base = OTHER; note = 2'-O-(2-methoxyethyl) ribonucleotide
  misc_feature 1..5: note = RNA
  misc_feature 6..15: note = DNA
  misc_feature 16..20: note = RNA
  modified_base 16..20: mod_base = OTHER; note = 2'-O-(2-methoxyethyl) ribonucleotide
  modified_base 8: mod_base = OTHER; note = 5-methyl cytidine
  modified_base 17: mod_base = OTHER; note = 5-methyl cytidine
ttttagactggattttcaga

SEQ ID NO: 934 - DNA, 20 bp, synthetic construct
  source 1..20: mol_type = other DNA
  modified_base 1..20: mod_base = OTHER; note = Phosphorothioate linkage
  modified_base 1..5: mod_base = OTHER; note = 2'-O-(2-methoxyethyl) ribonucleotide
  misc_feature 1..5: note = RNA
  misc_feature 6..15: note = DNA
  misc_feature 16..20: note = RNA
  modified_base 16..20: mod_base = OTHER; note = 2'-O-(2-methoxyethyl) ribonucleotide
  modified_base 1..3: mod_base = OTHER; note = 5-methyl cytidine
  modified_base 12: mod_base = OTHER; note = 5-methyl cytidine
ccctttttagactggatttt

SEQ ID NO: 935 - DNA, 20 bp, synthetic construct
  source 1..20: mol_type = other DNA
  modified_base 1..20: mod_base = OTHER; note = Phosphorothioate linkage
  modified_base 1..5: mod_base = OTHER; note = 2'-O-(2-methoxyethyl) ribonucleotide
  misc_feature 1..5: note = RNA
  misc_feature 6..15: note = DNA
  misc_feature 16..20: note = RNA
  modified_base 16..20: mod_base = OTHER; note = 2'-O-(2-methoxyethyl) ribonucleotide
  modified_base 3..5: mod_base = OTHER; note = 5-methyl cytidine
  modified_base 14: mod_base = OTHER; note = 5-methyl cytidine
aaccctttttagactggatt

SEQ ID NO: 936 - DNA, 20 bp, synthetic construct
  source 1..20: mol_type = other DNA
  modified_base 1..20: mod_base = OTHER; note = Phosphorothioate linkage
  modified_base 1..5: mod_base = OTHER; note = 2'-O-(2-methoxyethyl) ribonucleotide
  misc_feature 1..5: note = RNA
  misc_feature 6..15: note = DNA
  misc_feature 16..20: note = RNA
  modified_base 16..20: mod_base = OTHER; note = 2'-O-(2-methoxyethyl) ribonucleotide
  modified_base 4..6: mod_base = OTHER; note = 5-methyl cytidine
  modified_base 15: mod_base = OTHER; note = 5-methyl cytidine
gaaccctttttagactggat

SEQ ID NO: 937 - DNA, 20 bp, synthetic construct
  source 1..20: mol_type = other DNA
  modified_base 1..5: mod_base = OTHER; note = 2'-O-(2-methoxyethyl) ribonucleotide
  misc_feature 1..5: note = RNA
  misc_feature 6..15: note = DNA
  misc_feature 16..20: note = RNA
  modified_base 16..20: mod_base = OTHER; note = 2'-O-(2-methoxyethyl) ribonucleotide
  modified_base 1..20: mod_base = OTHER; note = 2'-O-(2-methoxyethyl) ribonucleotide
  modified_base 6..8: mod_base = OTHER; note = 5-methyl cytidine
  modified_base 17: mod_base = OTHER; note = 5-methyl cytidine
gagaaccctttttagactgg

SEQ ID NO: 938 - DNA, 20 bp, synthetic construct
  source 1..20: mol_type = other DNA
  modified_base 1..20: mod_base = OTHER; note = Phosphorothioate linkage
  modified_base 1..5: mod_base = OTHER; note = 2'-O-(2-methoxyethyl) ribonucleotide
  misc_feature 1..5: note = RNA
  misc_feature 6..15: note = DNA
  misc_feature 16..20: note = RNA
  modified_base 16..20: mod_base = OTHER; note = 2'-O-(2-methoxyethyl) ribonucleotide
  modified_base 7..9: mod_base = OTHER; note = 5-methyl cytidine
  modified_base 18: mod_base = OTHER; note = 5-methyl cytidine
ggagaaccctttttagactg

SEQ ID NO: 939 - DNA, 20 bp, synthetic construct
  source 1..20: mol_type = other DNA
  modified_base 1..20: mod_base = OTHER; note = Phosphorothioate linkage
  modified_base 1..5: mod_base = OTHER; note = 2'-O-(2-methoxyethyl) ribonucleotide
  misc_feature 1..5: note = RNA
  misc_feature 6..15: note = DNA
  misc_feature 16..20: note = RNA
  modified_base 16..20: mod_base = OTHER; note = 2'-O-(2-methoxyethyl) ribonucleotide
  modified_base 9..11: mod_base = OTHER; note = 5-methyl cytidine
  modified_base 20: mod_base = OTHER; note = 5-methyl cytidine
atggagaaccctttttagac

SEQ ID NO: 940 - DNA, 20 bp, synthetic construct
  source 1..20: mol_type = other DNA
  modified_base 1..20: mod_base = OTHER; note = Phosphorothioate linkage
  modified_base 1..5: mod_base = OTHER; note = 2'-O-(2-methoxyethyl) ribonucleotide
  misc_feature 1..5: note = RNA
  misc_feature 6..15: note = DNA
  misc_feature 16..20: note = RNA
  modified_base 16..20: mod_base = OTHER; note = 2'-O-(2-methoxyethyl) ribonucleotide
  modified_base 10..12: mod_base = OTHER; note = 5-methyl cytidine
tatggagaaccctttttaga

SEQ ID NO: 941 - DNA, 20 bp, synthetic construct
  source 1..20: mol_type = other DNA
  modified_base 1..20: mod_base = OTHER; note = Phosphorothioate linkage
  modified_base 1..5: mod_base = OTHER; note = 2'-O-(2-methoxyethyl) ribonucleotide
  misc_feature 1..5: note = RNA
  misc_feature 6..15: note = DNA
  misc_feature 16..20: note = RNA
  modified_base 16..20: mod_base = OTHER; note = 2'-O-(2-methoxyethyl) ribonucleotide
  modified_base 12..14: mod_base = OTHER; note = 5-methyl cytidine
ggtatggagaacccttttta

SEQ ID NO: 942 - DNA, 20 bp, synthetic construct
  source 1..20: mol_type = other DNA
  modified_base 1..20: mod_base = OTHER; note = Phosphorothioate linkage
  modified_base 1..5: mod_base = OTHER; note = 2'-O-(2-methoxyethyl) ribonucleotide
  misc_feature 1..5: note = RNA
  misc_feature 6..15: note = DNA
  misc_feature 16..20: note = RNA
  modified_base 16..20: mod_base = OTHER; note = 2'-O-(2-methoxyethyl) ribonucleotide
  modified_base 13..15: mod_base = OTHER; note = 5-methyl cytidine
aggtatggagaacccttttt

SEQ ID NO: 943 - DNA, 20 bp, synthetic construct
  source 1..20: mol_type = other DNA
  modified_base 1..20: mod_base = OTHER; note = Phosphorothioate linkage
  modified_base 1..5: mod_base = OTHER; note = 2'-O-(2-methoxyethyl) ribonucleotide
  misc_feature 1..5: note = RNA
  misc_feature 6..15: note = DNA
  misc_feature 16..20: note = RNA
  modified_base 16..20: mod_base = OTHER; note = 2'-O-(2-methoxyethyl) ribonucleotide
  modified_base 16..18: mod_base = OTHER; note = 5-methyl cytidine
tgtaggtatggagaaccctt

SEQ ID NO: 944 - DNA, 20 bp, synthetic construct
  source 1..20: mol_type = other DNA
  modified_base 1..20: mod_base = OTHER; note = Phosphorothioate linkage
  modified_base 1..5: mod_base = OTHER; note = 2'-O-(2-methoxyethyl) ribonucleotide
  misc_feature 1..5: note = RNA
  misc_feature 6..15: note = DNA
  misc_feature 16..20: note = RNA
  modified_base 16..20: mod_base = OTHER; note = 2'-O-(2-methoxyethyl) ribonucleotide
  modified_base 5: mod_base = OTHER; note = 5-methyl cytidine
atatctgtaggtatggagaa

SEQ ID NO: 945 - DNA, 20 bp, synthetic construct
  source 1..20: mol_type = other DNA
  modified_base 1..20: mod_base = OTHER; note = Phosphorothioate linkage
  modified_base 1..5: mod_base = OTHER; note = 2'-O-(2-methoxyethyl) ribonucleotide
  misc_feature 1..5: note = RNA
  misc_feature 6..15: note = DNA
  misc_feature 16..20: note = RNA
  modified_base 16..20: mod_base = OTHER; note = 2'-O-(2-methoxyethyl) ribonucleotide
  modified_base 7: mod_base = OTHER; note = 5-methyl cytidine
agatatctgtaggtatggag

SEQ ID NO: 946 - DNA, 20 bp, synthetic construct
  source 1..20: mol_type = other DNA
  modified_base 1..20: mod_base = OTHER; note = Phosphorothioate linkage
  modified_base 1..5: mod_base = OTHER; note = 2'-O-(2-methoxyethyl) ribonucleotide
  misc_feature 1..5: note = RNA
  misc_feature 6..15: note = DNA
  misc_feature 16..20: note = RNA
  modified_base 16..20: mod_base = OTHER; note = 2'-O-(2-methoxyethyl) ribonucleotide
  modified_base 8: mod_base = OTHER; note = 5-methyl cytidine
aagatatctgtaggtatgga

SEQ ID NO: 947 - DNA, 20 bp, synthetic construct
  source 1..20: mol_type = other DNA
  modified_base 1..20: mod_base = OTHER; note = Phosphorothioate linkage
  modified_base 1..5: mod_base = OTHER; note = 2'-O-(2-methoxyethyl) ribonucleotide
  misc_feature 1..5: note = RNA
  misc_feature 6..15: note = DNA
  misc_feature 16..20: note = RNA
  modified_base 16..20: mod_base = OTHER; note = 2'-O-(2-methoxyethyl) ribonucleotide
  modified_base 1: mod_base = OTHER; note = 5-methyl cytidine
  modified_base 10: mod_base = OTHER; note = 5-methyl cytidine
ctaagatatctgtaggtatg

SEQ ID NO: 948 - DNA, 20 bp, synthetic construct
  source 1..20: mol_type = other DNA
  modified_base 1..20: mod_base = OTHER; note = Phosphorothioate linkage
  modified_base 1..5: mod_base = OTHER; note = 2'-O-(2-methoxyethyl) ribonucleotide
  misc_feature 1..5: note = RNA
  misc_feature 6..15: note = DNA
  misc_feature 16..20: note = RNA
  modified_base 16..20: mod_base = OTHER; note = 2'-O-(2-methoxyethyl) ribonucleotide
  modified_base 2: mod_base = OTHER; note = 5-methyl cytidine
  modified_base 11: mod_base = OTHER; note = 5-methyl cytidine
tctaagatatctgtaggtat

SEQ ID NO: 949 - DNA, 20 bp, synthetic construct
  source 1..20: mol_type = other DNA
  modified_base 1..20: mod_base = OTHER; note = Phosphorothioate linkage
  modified_base 1..5: mod_base = OTHER; note = 2'-O-(2-methoxyethyl) ribonucleotide
  misc_feature 1..5: note = RNA
  misc_feature 6..15: note = DNA
  misc_feature 16..20: note = RNA
  modified_base 16..20: mod_base = OTHER; note = 2'-O-(2-methoxyethyl) ribonucleotide
  modified_base 3: mod_base = OTHER; note = 5-methyl cytidine
  modified_base 12: mod_base = OTHER; note = 5-methyl cytidine
gtctaagatatctgtaggta

SEQ ID NO: 950 - DNA, 20 bp, synthetic construct
  source 1..20: mol_type = other DNA
  modified_base 1..20: mod_base = OTHER; note = Phosphorothioate linkage
  modified_base 1..5: mod_base = OTHER; note = 2'-O-(2-methoxyethyl) ribonucleotide
  misc_feature 1..5: note = RNA
  misc_feature 6..15: note = DNA
  misc_feature 16..20: note = RNA
  modified_base 16..20: mod_base = OTHER; note = 2'-O-(2-methoxyethyl) ribonucleotide
  modified_base 5: mod_base = OTHER; note = 5-methyl cytidine
  modified_base 14: mod_base = OTHER; note = 5-methyl cytidine
gagtctaagatatctgtagg

SEQ ID NO: 951 - DNA, 20 bp, synthetic construct
  source 1..20: mol_type = other DNA
  modified_base 1..20: mod_base = OTHER; note = Phosphorothioate linkage
  modified_base 1..5: mod_base = OTHER; note = 2'-O-(2-methoxyethyl) ribonucleotide
  misc_feature 1..5: note = RNA
  misc_feature 6..15: note = DNA
  misc_feature 16..20: note = RNA
  modified_base 16..20: mod_base = OTHER; note = 2'-O-(2-methoxyethyl) ribonucleotide
  modified_base 7: mod_base = OTHER; note = 5-methyl cytidine
  modified_base 16: mod_base = OTHER; note = 5-methyl cytidine
tggagtctaagatatctgta

SEQ ID NO: 952 - DNA, 20 bp, synthetic construct
  source 1..20: mol_type = other DNA
  modified_base 1..20: mod_base = OTHER; note = Phosphorothioate linkage
  modified_base 1..5: mod_base = OTHER; note = 2'-O-(2-methoxyethyl) ribonucleotide
  misc_feature 1..5: note = RNA
  misc_feature 6..15: note = DNA
  misc_feature 16..20: note = RNA
  modified_base 16..20: mod_base = OTHER; note = 2'-O-(2-methoxyethyl) ribonucleotide
  modified_base 1: mod_base = OTHER; note = 5-methyl cytidine
  modified_base 8: mod_base = OTHER; note = 5-methyl cytidine
  modified_base 17: mod_base = OTHER; note = 5-methyl cytidine
ctggagtctaagatatctgt

SEQ ID NO: 953 - DNA, 20 bp, synthetic construct
  source 1..20: mol_type = other DNA
  modified_base 1..20: mod_base = OTHER; note = Phosphorothioate linkage
  modified_base 1..5: mod_base = OTHER; note = 2'-O-(2-methoxyethyl) ribonucleotide
  misc_feature 1..5: note = RNA
  misc_feature 6..15: note = DNA
  misc_feature 16..20: note = RNA
  modified_base 16..20: mod_base = OTHER; note = 2'-O-(2-methoxyethyl) ribonucleotide
  modified_base 2: mod_base = OTHER; note = 5-methyl cytidine
  modified_base 9: mod_base = OTHER; note = 5-methyl cytidine
  modified_base 18: mod_base = OTHER; note = 5-methyl cytidine
tctggagtctaagatatctg

SEQ ID NO: 954 - DNA, 20 bp, synthetic construct
  source 1..20: mol_type = other DNA
  modified_base 1..20: mod_base = OTHER; note = Phosphorothioate linkage
  modified_base 1..5: mod_base = OTHER; note = 2'-O-(2-methoxyethyl) ribonucleotide
  misc_feature 1..5: note = RNA
  misc_feature 6..15: note = DNA
  misc_feature 16..20: note = RNA
  modified_base 16..20: mod_base = OTHER; note = 2'-O-(2-methoxyethyl) ribonucleotide
  modified_base 3: mod_base = OTHER; note = 5-methyl cytidine
  modified_base 10: mod_base = OTHER; note = 5-methyl cytidine
  modified_base 19: mod_base = OTHER; note = 5-methyl cytidine
gtctggagtctaagatatct

SEQ ID NO: 955 - DNA, 20 bp, synthetic construct
  source 1..20: mol_type = other DNA
  modified_base 1..20: mod_base = OTHER; note = Phosphorothioate linkage
  modified_base 1..5: mod_base = OTHER; note = 2'-O-(2-methoxyethyl) ribonucleotide
  misc_feature 1..5: note = RNA
  misc_feature 6..15: note = DNA
  misc_feature 16..20: note = RNA
  modified_base 16..20: mod_base = OTHER; note = 2'-O-(2-methoxyethyl) ribonucleotide
  modified_base 4: mod_base = OTHER; note = 5-methyl cytidine
  modified_base 11: mod_base = OTHER; note = 5-methyl cytidine
  modified_base 20: mod_base = OTHER; note = 5-methyl cytidine
ggtctggagtctaagatatc

SEQ ID NO: 956 - DNA, 20 bp, synthetic construct
  source 1..20: mol_type = other DNA
  modified_base 1..20: mod_base = OTHER; note = Phosphorothioate linkage
  modified_base 1..5: mod_base = OTHER; note = 2'-O-(2-methoxyethyl) ribonucleotide
  misc_feature 1..5: note = RNA
  misc_feature 6..15: note = DNA
  misc_feature 16..20: note = RNA
  modified_base 16..20: mod_base = OTHER; note = 2'-O-(2-methoxyethyl) ribonucleotide
  modified_base 5: mod_base = OTHER; note = 5-methyl cytidine
  modified_base 12: mod_base = OTHER; note = 5-methyl cytidine
gggtctggagtctaagatat

SEQ ID NO: 957 - DNA, 20 bp, synthetic construct
  source 1..20: mol_type = other DNA
  modified_base 1..20: mod_base = OTHER; note = Phosphorothioate linkage
  modified_base 1..3: mod_base = OTHER; note = 2'-O-(2-methoxyethyl) ribonucleotide
  modified_base 4: mod_base = OTHER; note = Locked nucleic acid
  modified_base 5: mod_base = OTHER; note = 2'-O-(2-methoxyethyl) ribonucleotide
  misc_feature 1..5: note = RNA
  misc_feature 6..15: note = DNA
  misc_feature 16..20: note = RNA
  modified_base 16..20: mod_base = OTHER; note = 2'-O-(2-methoxyethyl) ribonucleotide
  modified_base 1: mod_base = OTHER; note = 5-methyl cytidine
  modified_base 5: mod_base = OTHER; note = 5-methyl cytidine
  modified_base 7: mod_base = OTHER; note = 5-methyl cytidine
  modified_base 15: mod_base = OTHER; note = 5-methyl cytidine
ctttctctgtgggtctaggg

SEQ ID NO: 958 - DNA, 20 bp, synthetic construct
  source 1..20: mol_type = other DNA
  modified_base 1..20: mod_base = OTHER; note = Phosphorothioate linkage
  modified_base 1..5: mod_base = OTHER; note = 2'-O-(2-methoxyethyl) ribonucleotide
  misc_feature 1..5: note = RNA
  misc_feature 6..15: note = DNA
  misc_feature 16..20: note = RNA
  modified_base 16: mod_base = OTHER; note = 2'-O-(2-methoxyethyl) ribonucleotide
  modified_base 17: mod_base = OTHER; note = Locked nucleic acid
  modified_base 18..20: mod_base = OTHER; note = 2'-O-(2-methoxyethyl) ribonucleotide
  modified_base 1: mod_base = OTHER; note = 5-methyl cytidine
  modified_base 5: mod_base = OTHER; note = 5-methyl cytidine
  modified_base 7: mod_base = OTHER; note = 5-methyl cytidine
  modified_base 15: mod_base = OTHER; note = 5-methyl cytidine
ctttctctgtgggtctaggg

SEQ ID NO: 959 - DNA, 20 bp, synthetic construct
  source 1..20: mol_type = other DNA
  modified_base 1..20: mod_base = OTHER; note = Phosphorothioate linkage
  modified_base 1..4: mod_base = OTHER; note = 2'-O-(2-methoxyethyl) ribonucleotide
  modified_base 5: mod_base = OTHER; note = Locked nucleic acid
  misc_feature 1..5: note = RNA
  misc_feature 6..15: note = DNA
  misc_feature 16..20: note = RNA
  modified_base 16: mod_base = OTHER; note = Locked nucleic acid
  modified_base 17..20: mod_base = OTHER; note = 2'-O-(2-methoxyethyl) ribonucleotide
  modified_base 1: mod_base = OTHER; note = 5-methyl cytidine
  modified_base 5: mod_base = OTHER; note = 5-methyl cytidine
  modified_base 7: mod_base = OTHER; note = 5-methyl cytidine
  modified_base 15: mod_base = OTHER; note = 5-methyl cytidine
ctttctctgtgggtctaggg

SEQ ID NO: 960 - DNA, 20 bp, synthetic construct
  source 1..20: mol_type = other DNA
  modified_base 1..20: mod_base = OTHER; note = Phosphorothioate linkage
  modified_base 1..4: mod_base = OTHER; note = 2'-O-(2-methoxyethyl) ribonucleotide
  modified_base 5: mod_base = OTHER; note = Locked nucleic acid
  misc_feature 1..5: note = RNA
  misc_feature 6..15: note = DNA
  misc_feature 16..20: note = RNA
  modified_base 16..20: mod_base = OTHER; note = 2'-O-(2-methoxyethyl) ribonucleotide
  modified_base 1: mod_base = OTHER; note = 5-methyl cytidine
  modified_base 5: mod_base = OTHER; note = 5-methyl cytidine
  modified_base 7: mod_base = OTHER; note = 5-methyl cytidine
  modified_base 15: mod_base = OTHER; note = 5-methyl cytidine
ctttctctgtgggtctaggg

SEQ ID NO: 961 - DNA, 20 bp, synthetic construct
  source 1..20: mol_type = other DNA
  modified_base 1..20: mod_base = OTHER; note = Phosphorothioate linkage
  modified_base 1..5: mod_base = OTHER; note = 2'-O-(2-methoxyethyl) ribonucleotide
  misc_feature 1..5: note = RNA
  misc_feature 6..15: note = DNA
  misc_feature 16..20: note = RNA
  modified_base 16: mod_base = OTHER; note = Locked nucleic acid
  modified_base 17..20: mod_base = OTHER; note = 2'-O-(2-methoxyethyl) ribonucleotide
  modified_base 1: mod_base = OTHER; note = 5-methyl cytidine
  modified_base 5: mod_base = OTHER; note = 5-methyl cytidine
  modified_base 7: mod_base = OTHER; note = 5-methyl cytidine
  modified_base 15: mod_base = OTHER; note = 5-methyl cytidine
ctttctctgtgggtctaggg

SEQ ID NO: 962 - DNA, 20 bp, synthetic construct
  source 1..20: mol_type = other DNA
  modified_base 1..20: mod_base = OTHER; note = Phosphorothioate linkage
  modified_base 1..3: mod_base = OTHER; note = 2'-O-(2-methoxyethyl) ribonucleotide
  modified_base 4..5: mod_base = OTHER; note = Locked nucleic acid
  misc_feature 1..5: note = RNA
  misc_feature 6..15: note = DNA
  misc_feature 16..20: note = RNA
  modified_base 16..20: mod_base = OTHER; note = 2'-O-(2-methoxyethyl) ribonucleotide
  modified_base 1: mod_base = OTHER; note = 5-methyl cytidine
  modified_base 5: mod_base = OTHER; note = 5-methyl cytidine
  modified_base 7: mod_base = OTHER; note = 5-methyl cytidine
  modified_base 15: mod_base = OTHER; note = 5-methyl cytidine
ctttctctgtgggtctaggg

SEQ ID NO: 963 - DNA, 20 bp, synthetic construct
  source 1..20: mol_type = other DNA
  modified_base 1..20: mod_base = OTHER; note = Phosphorothioate linkage
  modified_base 1..5: mod_base = OTHER; note = 2'-O-(2-methoxyethyl) ribonucleotide
  misc_feature 1..5: note = RNA
  misc_feature 6..15: note = DNA
  misc_feature 16..20: note = RNA
  modified_base 16..17: mod_base = OTHER; note = Locked nucleic acid
  modified_base 18..20: mod_base = OTHER; note = 2'-O-(2-methoxyethyl) ribonucleotide
  modified_base 1: mod_base = OTHER; note = 5-methyl cytidine
  modified_base 5: mod_base = OTHER; note = 5-methyl cytidine
  modified_base 7: mod_base = OTHER; note = 5-methyl cytidine
  modified_base 15: mod_base = OTHER; note = 5-methyl cytidine
ctttctctgtgggtctaggg

SEQ ID NO: 964 - DNA, 18 bp, synthetic construct
  source 1..18: mol_type = other DNA
  modified_base 1..18: mod_base = OTHER; note = Phosphorothioate linkage
  modified_base 1..5: mod_base = OTHER; note = 2'-O-(2-methoxyethyl) ribonucleotide
  misc_feature 1..5: note = RNA
  misc_feature 6..15: note = DNA
  misc_feature 16..18: note = RNA
  modified_base 16..18: mod_base = OTHER; note = 2'-O-(2-methoxyethyl) ribonucleotide
  modified_base 1: mod_base = OTHER; note = 5-methyl cytidine
  modified_base 5: mod_base = OTHER; note = 5-methyl cytidine
  modified_base 7: mod_base = OTHER; note = 5-methyl cytidine
  modified_base 15: mod_base = OTHER; note = 5-methyl cytidine
ctttctctgtgggtctag

SEQ ID NO: 965 - DNA, 18 bp, synthetic construct
  source 1..18: mol_type = other DNA
  modified_base 1..18: mod_base = OTHER; note = Phosphorothioate linkage
  modified_base 1..3: mod_base = OTHER; note = 2'-O-(2-methoxyethyl) ribonucleotide
  modified_base 4: mod_base = OTHER; note = Locked nucleic acid
  modified_base 5: mod_base = OTHER; note = 2'-O-(2-methoxyethyl) ribonucleotide
  misc_feature 1..5: note = RNA
  misc_feature 6..15: note = DNA
  misc_feature 16..18: note = RNA
  modified_base 16: mod_base = OTHER; note = 2'-O-(2-methoxyethyl) ribonucleotide
  modified_base 17: mod_base = OTHER; note = Locked nucleic acid
  modified_base 18: mod_base = OTHER; note = 2'-O-(2-methoxyethyl) ribonucleotide
  modified_base 1: mod_base = OTHER; note = 5-methyl cytidine
  modified_base 5: mod_base = OTHER; note = 5-methyl cytidine
  modified_base 7: mod_base = OTHER; note = 5-methyl cytidine
  modified_base 15: mod_base = OTHER; note = 5-methyl cytidine
ctttctctgtgggtctag

SEQ ID NO: 966 - DNA, 18 bp, synthetic construct
  source 1..18: mol_type = other DNA
  modified_base 1..18: mod_base = OTHER; note = Phosphorothioate linkage
  modified_base 1..3: mod_base = OTHER; note = 2'-O-(2-methoxyethyl) ribonucleotide
  modified_base 4: mod_base = OTHER; note = Locked nucleic acid
  modified_base 5: mod_base = OTHER; note = 2'-O-(2-methoxyethyl) ribonucleotide
  misc_feature 1..5: note = RNA
  misc_feature 6..15: note = DNA
  misc_feature 16..18: note = RNA
  modified_base 16..18: mod_base = OTHER; note = 2'-O-(2-methoxyethyl) ribonucleotide
  modified_base 1: mod_base = OTHER; note = 5-methyl cytidine
  modified_base 5: mod_base = OTHER; note = 5-methyl cytidine
  modified_base 7: mod_base = OTHER; note = 5-methyl cytidine
  modified_base 15: mod_base = OTHER; note = 5-methyl cytidine
ctttctctgtgggtctag

SEQ ID NO: 967 - DNA, 18 bp, synthetic construct
  source 1..18: mol_type = other DNA
  modified_base 1..18: mod_base = OTHER; note = Phosphorothioate linkage
  modified_base 1..5: mod_base = OTHER; note = 2'-O-(2-methoxyethyl) ribonucleotide
  misc_feature 1..5: note = RNA
  misc_feature 6..15: note = DNA
  misc_feature 16..18: note = RNA
  modified_base 16: mod_base = OTHER; note = 2'-O-(2-methoxyethyl) ribonucleotide
  modified_base 17: mod_base = OTHER; note = Locked nucleic acid
  modified_base 18: mod_base = OTHER; note = 2'-O-(2-methoxyethyl) ribonucleotide
  modified_base 1: mod_base = OTHER; note = 5-methyl cytidine
  modified_base 5: mod_base = OTHER; note = 5-methyl cytidine
  modified_base 7: mod_base = OTHER; note = 5-methyl cytidine
  modified_base 15: mod_base = OTHER; note = 5-methyl cytidine
ctttctctgtgggtctag

SEQ ID NO: 968 - DNA, 18 bp, synthetic construct
  source 1..18: mol_type = other DNA
  modified_base 1..18: mod_base = OTHER; note = Phosphorothioate linkage
  modified_base 1..4: mod_base = OTHER; note = 2'-O-(2-methoxyethyl) ribonucleotide
  modified_base 5: mod_base = OTHER; note = Locked nucleic acid
  misc_feature 1..5: note = RNA
  misc_feature 6..15: note = DNA
  misc_feature 16..18: note = RNA
  modified_base 16: mod_base = OTHER; note = Locked nucleic acid
  modified_base 17..18: mod_base = OTHER; note = 2'-O-(2-methoxyethyl) ribonucleotide
  modified_base 1: mod_base = OTHER; note = 5-methyl cytidine
  modified_base 5: mod_base = OTHER; note = 5-methyl cytidine
  modified_base 7: mod_base = OTHER; note = 5-methyl cytidine
  modified_base 15: mod_base = OTHER; note = 5-methyl cytidine
ctttctctgtgggtctag

SEQ ID NO: 969 - DNA, 18 bp, synthetic construct
  source 1..18: mol_type = other DNA
  modified_base 1..18: mod_base = OTHER; note = Phosphorothioate linkage
  modified_base 1..4: mod_base = OTHER; note = 2'-O-(2-methoxyethyl) ribonucleotide
  modified_base 5: mod_base = OTHER; note = Locked nucleic acid
  misc_feature 1..5: note = RNA
  misc_feature 6..15: note = DNA
  misc_feature 16..18: note = RNA
  modified_base 16..18: mod_base = OTHER; note = 2'-O-(2-methoxyethyl) ribonucleotide
  modified_base 1: mod_base = OTHER; note = 5-methyl cytidine
  modified_base 5: mod_base = OTHER; note = 5-methyl cytidine
  modified_base 7: mod_base = OTHER; note = 5-methyl cytidine
  modified_base 15: mod_base = OTHER; note = 5-methyl cytidine
ctttctctgtgggtctag

SEQ ID NO: 970 - DNA, 18 bp, synthetic construct
  source 1..18: mol_type = other DNA
  modified_base 1..18: mod_base = OTHER; note = Phosphorothioate linkage
  modified_base 1..5: mod_base = OTHER; note = 2'-O-(2-methoxyethyl) ribonucleotide
  misc_feature 1..5: note = RNA
  misc_feature 6..15: note = DNA
  misc_feature 16..18: note = RNA
  modified_base 16: mod_base = OTHER; note = Locked nucleic acid
  modified_base 17..18: mod_base = OTHER; note = 2'-O-(2-methoxyethyl) ribonucleotide
  modified_base 1: mod_base = OTHER; note = 5-methyl cytidine
  modified_base 5: mod_base = OTHER; note = 5-methyl cytidine
  modified_base 7: mod_base = OTHER; note = 5-methyl cytidine
  modified_base 15: mod_base = OTHER; note = 5-methyl cytidine
ctttctctgtgggtctag

SEQ ID NO: 971 - DNA, 18 bp, synthetic construct
  source 1..18: mol_type = other DNA
  modified_base 1..18: mod_base = OTHER; note = Phosphorothioate linkage
  modified_base 1..3: mod_base = OTHER; note = 2'-O-(2-methoxyethyl) ribonucleotide
  modified_base 4..5: mod_base = OTHER; note = Locked nucleic acid
  misc_feature 1..5: note = RNA
  misc_feature 6..15: note = DNA
  misc_feature 16..18: note = RNA
  modified_base 16..18: mod_base = OTHER; note = 2'-O-(2-methoxyethyl) ribonucleotide
  modified_base 1: mod_base = OTHER; note = 5-methyl cytidine
  modified_base 5: mod_base = OTHER; note = 5-methyl cytidine
  modified_base 7: mod_base = OTHER; note = 5-methyl cytidine
  modified_base 15: mod_base = OTHER; note = 5-methyl cytidine
ctttctctgtgggtctag

SEQ ID NO: 972 - DNA, 18 bp, synthetic construct
  source 1..18: mol_type = other DNA
  modified_base 1..18: mod_base = OTHER; note = Phosphorothioate linkage
  modified_base 1..5: mod_base = OTHER; note = 2'-O-(2-methoxyethyl) ribonucleotide
  misc_feature 1..5: note = RNA
  misc_feature 6..15: note = DNA
  misc_feature 16..18: note = RNA
  modified_base 16..17: mod_base = OTHER; note = Locked nucleic acid
  modified_base 18: mod_base = OTHER; note = 2'-O-(2-methoxyethyl) ribonucleotide
  modified_base 1: mod_base = OTHER; note = 5-methyl cytidine
  modified_base 5: mod_base = OTHER; note = 5-methyl cytidine
  modified_base 7: mod_base = OTHER; note = 5-methyl cytidine
  modified_base 15: mod_base = OTHER; note = 5-methyl cytidine
ctttctctgtgggtctag

SEQ ID NO: 973 - DNA, 20 bp, synthetic construct
  source 1..20: mol_type = other DNA
  modified_base 1..20: mod_base = OTHER; note = Phosphorothioate linkage
  modified_base 1..6: mod_base = OTHER; note = 2'-O-(2-methoxyethyl) ribonucleotide
  misc_feature 1..6: note = RNA
  misc_feature 7..16: note = DNA
  misc_feature 17..20: note = RNA
  modified_base 17..20: mod_base = OTHER; note = 2'-O-(2-methoxyethyl) ribonucleotide
  modified_base 2: mod_base = OTHER; note = 5-methyl cytidine
  modified_base 6: mod_base = OTHER; note = 5-methyl cytidine
  modified_base 8: mod_base = OTHER; note = 5-methyl cytidine
  modified_base 16: mod_base = OTHER; note = 5-methyl cytidine
tctttctctgtgggtctagg

SEQ ID NO: 974 - DNA, 20 bp, synthetic construct
  source 1..20: mol_type = other DNA
  modified_base 1..20: mod_base = OTHER; note = Phosphorothioate linkage
  modified_base 1..7: mod_base = OTHER; note = 2'-O-(2-methoxyethyl) ribonucleotide
  misc_feature 1..7: note = RNA
  misc_feature 8..17: note = DNA
  misc_feature 18..20: note = RNA
  modified_base 18..20: mod_base = OTHER; note = 2'-O-(2-methoxyethyl) ribonucleotide
  modified_base 3: mod_base = OTHER; note = 5-methyl cytidine
  modified_base 7: mod_base = OTHER; note = 5-methyl cytidine
  modified_base 9: mod_base = OTHER; note = 5-methyl cytidine
  modified_base 17: mod_base = OTHER; note = 5-methyl cytidine
atctttctctgtgggtctag

SEQ ID NO: 975 - DNA, 20 bp, synthetic construct
  source 1..20: mol_type = other DNA
  modified_base 1..20: mod_base = OTHER; note = Phosphorothioate linkage
  modified_base 1..4: mod_base = OTHER; note = 2'-O-(2-methoxyethyl) ribonucleotide
  misc_feature 1..4: note = RNA
  misc_feature 5..14: note = DNA
  misc_feature 15..20: note = RNA
  modified_base 15..20: mod_base = OTHER; note = 2'-O-(2-methoxyethyl) ribonucleotide
  modified_base 4: mod_base = OTHER; note = 5-methyl cytidine
  modified_base 6: mod_base = OTHER; note = 5-methyl cytidine
  modified_base 14: mod_base = OTHER; note = 5-methyl cytidine
tttctctgtgggtctagggt

SEQ ID NO: 976 - DNA, 20 bp, synthetic construct
  source 1..20: mol_type = other DNA
  modified_base 1..20: mod_base = OTHER; note = Phosphorothioate linkage
  modified_base 1..3: mod_base = OTHER; note = 2'-O-(2-methoxyethyl) ribonucleotide
  misc_feature 1..3: note = RNA
  misc_feature 4..13: note = DNA
  misc_feature 14..20: note = RNA
  modified_base 14..20: mod_base = OTHER; note = 2'-O-(2-methoxyethyl) ribonucleotide
  modified_base 3: mod_base = OTHER; note = 5-methyl cytidine
  modified_base 5: mod_base = OTHER; note = 5-methyl cytidine
  modified_base 13: mod_base = OTHER; note = 5-methyl cytidine
  modified_base 20: mod_base = OTHER; note = 5-methyl cytidine
ttctctgtgggtctagggtc

SEQ ID NO: 977 - DNA, 18 bp, synthetic construct
  source 1..18: mol_type = other DNA
  modified_base 1..18: mod_base = OTHER; note = Phosphorothioate linkage
  modified_base 1..4: mod_base = OTHER; note = 2'-O-(2-methoxyethyl) ribonucleotide
  misc_feature 1..4: note = RNA
  misc_feature 5..14: note = DNA
  misc_feature 15..18: note = RNA
  modified_base 15..18: mod_base = OTHER; note = 2'-O-(2-methoxyethyl) ribonucleotide
  modified_base 3..4: mod_base = OTHER; note = 5-methyl cytidine
  modified_base 6: mod_base = OTHER; note = 5-methyl cytidine
  modified_base 10: mod_base = OTHER; note = 5-methyl cytidine
  modified_base 12: mod_base = OTHER; note = 5-methyl cytidine
  modified_base 14: mod_base = OTHER; note = 5-methyl cytidine
  modified_base 16: mod_base = OTHER; note = 5-methyl cytidine
gacctctgtctctctctg

SEQ ID NO: 978 - DNA, 26 bp, synthetic construct
  source 1..26: mol_type = other DNA
  modified_base 1..26: mod_base = OTHER; note = Phosphorothioate linkage
  modified_base 1..8: mod_base = OTHER; note = 2'-O-(2-methoxyethyl) ribonucleotide
  misc_feature 1..8: note = RNA
  misc_feature 9..18: note = DNA
  misc_feature 19..26: note = RNA
  modified_base 19..26: mod_base = OTHER; note = 2'-O-(2-methoxyethyl) ribonucleotide
  modified_base 7..8: mod_base = OTHER; note = 5-methyl cytidine
  modified_base 10: mod_base = OTHER; note = 5-methyl cytidine
  modified_base 14: mod_base = OTHER; note = 5-methyl cytidine
  modified_base 16: mod_base = OTHER; note = 5-methyl cytidine
  modified_base 18: mod_base = OTHER; note = 5-methyl cytidine
  modified_base 20: mod_base = OTHER; note = 5-methyl cytidine
ttaggacctctgtctctctctggtgt

SEQ ID NO: 979 - DNA, 22 bp, synthetic construct
  source 1..22: mol_type = other DNA
  modified_base 1..4: mod_base = OTHER; note = Phosphorothioate linkage
  modified_base 5..18: mod_base = OTHER; note = Phosphorothioate linkage
  modified_base 19..22: mod_base = OTHER; note = Phosphorothioate linkage
  modified_base 1..6: mod_base = OTHER; note = 2'-O-(2-methoxyethyl) ribonucleotide
  misc_feature 1..6: note = RNA
  misc_feature 7..16: note = DNA
  misc_feature 17..20: note = RNA
  modified_base 17..22: mod_base = OTHER; note = 2'-O-(2-methoxyethyl) ribonucleotide
  modified_base 5..6: mod_base = OTHER; note = 5-methyl cytidine
  modified_base 8: mod_base = OTHER; note = 5-methyl cytidine
  modified_base 12: mod_base = OTHER; note = 5-methyl cytidine
  modified_base 14: mod_base = OTHER; note = 5-methyl cytidine
  modified_base 16: mod_base = OTHER; note = 5-methyl cytidine
  modified_base 18: mod_base = OTHER; note = 5-methyl cytidine
aggacctctgtctctctctggt

SEQ ID NO: 980 - DNA, 22 bp, synthetic construct
  source 1..22: mol_type = other DNA
  modified_base 1..18: mod_base = OTHER; note = Phosphorothioate linkage
  modified_base 19..22: mod_base = OTHER; note = Phosphorothioate linkage
  modified_base 1..6: mod_base = OTHER; note = 2'-O-(2-methoxyethyl) ribonucleotide
  misc_feature 1..6: note = RNA
  misc_feature 7..16: note = DNA
  misc_feature 17..22: note = RNA
  modified_base 17..22: mod_base = OTHER; note = 2'-O-(2-methoxyethyl) ribonucleotide
  modified_base 5..6: mod_base = OTHER; note = 5-methyl cytidine
  modified_base 8: mod_base = OTHER; note = 5-methyl cytidine
  modified_base 12: mod_base = OTHER; note = 5-methyl cytidine
  modified_base 14: mod_base = OTHER; note = 5-methyl cytidine
  modified_base 16: mod_base = OTHER; note = 5-methyl cytidine
  modified_base 18: mod_base = OTHER; note = 5-methyl cytidine
aggacctctgtctctctctggt

SEQ ID NO: 981 - DNA, 22 bp, synthetic construct
  source 1..22: mol_type = other DNA
  modified_base 1..4: mod_base = OTHER; note = Phosphorothioate linkage
  modified_base 5..22: mod_base = OTHER; note = Phosphorothioate linkage
  modified_base 1..6: mod_base = OTHER; note = 2'-O-(2-methoxyethyl) ribonucleotide
  misc_feature 1..6: note = RNA
  misc_feature 7..16: note = DNA
  misc_feature 17..22: note = RNA
  modified_base 17..22: mod_base = OTHER; note = 2'-O-(2-methoxyethyl) ribonucleotide
  modified_base 5..6: mod_base = OTHER; note = 5-methyl cytidine
  modified_base 8: mod_base = OTHER; note = 5-methyl cytidine
  modified_base 12: mod_base = OTHER; note = 5-methyl cytidine
  modified_base 14: mod_base = OTHER; note = 5-methyl cytidine
  modified_base 16: mod_base = OTHER; note = 5-methyl cytidine
  modified_base 18: mod_base = OTHER; note = 5-methyl cytidine
aggacctctgtctctctctggt

SEQ ID NO: 982 - DNA, 22 bp, synthetic construct
  source 1..22: mol_type = other DNA
  modified_base 1..5: mod_base = OTHER; note = Phosphorothioate linkage
  modified_base 6..17: mod_base = OTHER; note = Phosphorothioate linkage
  modified_base 18..22: mod_base = OTHER; note = Phosphorothioate linkage
  modified_base 1..6: mod_base = OTHER; note = 2'-O-(2-methoxyethyl) ribonucleotide
  misc_feature 1..6: note = RNA
  misc_feature 7..16: note = DNA
  misc_feature 17..22: note = RNA
  modified_base 17..22: mod_base = OTHER; note = 2'-O-(2-methoxyethyl) ribonucleotide
  modified_base 5..6: mod_base = OTHER; note = 5-methyl cytidine
  modified_base 8: mod_base = OTHER; note = 5-methyl cytidine
  modified_base 12: mod_base = OTHER; note = 5-methyl cytidine
  modified_base 14: mod_base = OTHER; note = 5-methyl cytidine
  modified_base 16: mod_base = OTHER; note = 5-methyl cytidine
  modified_base 18: mod_base = OTHER; note = 5-methyl cytidine
aggacctctgtctctctctggt

SEQ ID NO: 983 - DNA, 22 bp, synthetic construct
  source 1..22: mol_type = other DNA
  modified_base 1..17: mod_base = OTHER; note = Phosphorothioate linkage
  modified_base 18..22: mod_base = OTHER; note = Phosphorothioate linkage
  modified_base 1..6: mod_base = OTHER; note = 2'-O-(2-methoxyethyl) ribonucleotide
  misc_feature 1..6: note = RNA
  misc_feature 7..16: note = DNA
  misc_feature 17..22: note = RNA
  modified_base 17..22: mod_base = OTHER; note = 2'-O-(2-methoxyethyl) ribonucleotide
  modified_base 5..6: mod_base = OTHER; note = 5-methyl cytidine
  modified_base 8: mod_base = OTHER; note = 5-methyl cytidine
  modified_base 12: mod_base = OTHER; note = 5-methyl cytidine
  modified_base 14: mod_base = OTHER; note = 5-methyl cytidine
  modified_base 16: mod_base = OTHER; note = 5-methyl cytidine
  modified_base 18: mod_base = OTHER; note = 5-methyl cytidine
aggacctctgtctctctctggt

SEQ ID NO: 984 - DNA, 22 bp, synthetic construct
  source 1..22: mol_type = other DNA
  modified_base 1..5: mod_base = OTHER; note = Phosphorothioate linkage
  modified_base 6..22: mod_base = OTHER; note = Phosphorothioate linkage
  modified_base 1..6: mod_base = OTHER; note = 2'-O-(2-methoxyethyl) ribonucleotide
  misc_feature 1..6: note = RNA
  misc_feature 7..16: note = DNA
  misc_feature 17..22: note = RNA
  modified_base 17..22: mod_base = OTHER; note = 2'-O-(2-methoxyethyl) ribonucleotide
  modified_base 5..6: mod_base = OTHER; note = 5-methyl cytidine
  modified_base 8: mod_base = OTHER; note = 5-methyl cytidine
  modified_base 12: mod_base = OTHER; note = 5-methyl cytidine
  modified_base 14: mod_base = OTHER; note = 5-methyl cytidine
  modified_base 16: mod_base = OTHER; note = 5-methyl cytidine
  modified_base 18: mod_base = OTHER; note = 5-methyl cytidine
aggacctctgtctctctctggt

SEQ ID NO: 985 - DNA, 22 bp, synthetic construct
  source 1..22: mol_type = other DNA
  modified_base 1..6: mod_base = OTHER; note = Phosphorothioate linkage
  modified_base 7..16: mod_base = OTHER; note = Phosphorothioate linkage
  modified_base 17..22: mod_base = OTHER; note = Phosphorothioate linkage
  modified_base 1..6: mod_base = OTHER; note = 2'-O-(2-methoxyethyl) ribonucleotide
  misc_feature 1..6: note = RNA
  misc_feature 7..16: note = DNA
  misc_feature 17..22: note = RNA
  modified_base 16..22: mod_base = OTHER; note = 2'-O-(2-methoxyethyl) ribonucleotide
  modified_base 5..6: mod_base = OTHER; note = 5-methyl cytidine
  modified_base 8: mod_base = OTHER; note = 5-methyl cytidine
  modified_base 12: mod_base = OTHER; note = 5-methyl cytidine
  modified_base 14: mod_base = OTHER; note = 5-methyl cytidine
  modified_base 16: mod_base = OTHER; note = 5-methyl cytidine
  modified_base 18: mod_base = OTHER; note = 5-methyl cytidine
aggacctctgtctctctctggt

SEQ ID NO: 986 - DNA, 22 bp, synthetic construct
  source 1..22: mol_type = other DNA
  modified_base 1..16: mod_base = OTHER; note = Phosphorothioate linkage
  modified_base 17..22: mod_base = OTHER; note = Phosphorothioate linkage
  modified_base 1..6: mod_base = OTHER; note = 2'-O-(2-methoxyethyl) ribonucleotide
  misc_feature 1..6: note = RNA
  misc_feature 7..16: note = DNA
  misc_feature 17..22: note = RNA
  modified_base 17..22: mod_base = OTHER; note = 2'-O-(2-methoxyethyl) ribonucleotide
  modified_base 5..6: mod_base = OTHER; note = 5-methyl cytidine
  modified_base 8: mod_base = OTHER; note = 5-methyl cytidine
  modified_base 12: mod_base = OTHER; note = 5-methyl cytidine
  modified_base 14: mod_base = OTHER; note = 5-methyl cytidine
  modified_base 16: mod_base = OTHER; note = 5-methyl cytidine
aggacctctgtctctctctggt

SEQ ID NO: 987 - DNA, 22 bp, synthetic construct
  source 1..22: mol_type = other DNA
  modified_base 1..6: mod_base = OTHER; note = Phosphorothioate linkage
  modified_base 7..22: mod_base = OTHER; note = Phosphorothioate linkage
  modified_base 1..6: mod_base = OTHER; note = 2'-O-(2-methoxyethyl) ribonucleotide
  misc_feature 1..6: note = RNA
  misc_feature 7..16: note = DNA
  misc_feature 17..22: note = RNA
  modified_base 17..22: mod_base = OTHER; note = 2'-O-(2-methoxyethyl) ribonucleotide
  modified_base 5..6: mod_base = OTHER; note = 5-methyl cytidine
  modified_base 8: mod_base = OTHER; note = 5-methyl cytidine
  modified_base 12: mod_base = OTHER; note = 5-methyl cytidine
  modified_base 14: mod_base = OTHER; note = 5-methyl cytidine
  modified_base 16: mod_base = OTHER; note = 5-methyl cytidine
  modified_base 18: mod_base = OTHER; note = 5-methyl cytidine
aggacctctgtctctctctggt

SEQ ID NO: 988 - DNA, 20 bp, synthetic construct
  source 1..20: mol_type = other DNA
  modified_base 1..20: mod_base = OTHER; note = Phosphorothioate linkage
  modified_base 1..4: mod_base = OTHER; note = 2'-O-(2-methoxyethyl) ribonucleotide
  misc_feature 1..4: note = RNA
  misc_feature 5..14: note = DNA
  misc_feature 15..20: note = RNA
  modified_base 15..20: mod_base = OTHER; note = 2'-O-(2-methoxyethyl) ribonucleotide
  modified_base 1: mod_base = OTHER; note = 5-methyl cytidine
  modified_base 7..8: mod_base = OTHER; note = 5-methyl cytidine
  modified_base 12..14: mod_base = OTHER; note = 5-methyl cytidine
  modified_base 16: mod_base = OTHER; note = 5-methyl cytidine
caagtgccaggcccacatgg

SEQ ID NO: 989 - DNA, 20 bp, synthetic construct
  source 1..20: mol_type = other DNA
  modified_base 1..20: mod_base = OTHER; note = Phosphorothioate linkage
  modified_base 1..6: mod_base = OTHER; note = 2'-O-(2-methoxyethyl) ribonucleotide
  misc_feature 1..6: note = RNA
  misc_feature 7..16: note = DNA
  misc_feature 17..20: note = RNA
  modified_base 17..20: mod_base = OTHER; note = 2'-O-(2-methoxyethyl) ribonucleotide
  modified_base 3: mod_base = OTHER; note = 5-methyl cytidine
  modified_base 9..10: mod_base = OTHER; note = 5-methyl cytidine
  modified_base 14..16: mod_base = OTHER; note = 5-methyl cytidine
  modified_base 18: mod_base = OTHER; note = 5-methyl cytidine
ggcaagtgccaggcccacat

SEQ ID NO: 990 - DNA, 20 bp, synthetic construct
  source 1..20: mol_type = other DNA
  modified_base 1..20: mod_base = OTHER; note = Phosphorothioate linkage
  modified_base 1..7: mod_base = OTHER; note = 2'-O-(2-methoxyethyl) ribonucleotide
  misc_feature 1..7: note = RNA
  misc_feature 8..17: note = DNA
  misc_feature 18..20: note = RNA
  modified_base 18..20: mod_base = OTHER; note = 2'-O-(2-methoxyethyl) ribonucleotide
  modified_base 4: mod_base = OTHER; note = 5-methyl cytidine
  modified_base 10..11: mod_base = OTHER; note = 5-methyl cytidine
  modified_base 15..17: mod_base = OTHER; note = 5-methyl cytidine
  modified_base 19: mod_base = OTHER; note = 5-methyl cytidine
gggcaagtgccaggcccaca

SEQ ID NO: 991 - DNA, 22 bp, synthetic construct
  source 1..22: mol_type = other DNA
  modified_base 1..22: mod_base = OTHER; note = Phosphorothioate linkage
  modified_base 1..6: mod_base = OTHER; note = 2'-O-(2-methoxyethyl) ribonucleotide
  misc_feature 1..6: note = RNA
  misc_feature 7..16: note = DNA
  misc_feature 17..22: note = RNA
  modified_base 17..22: mod_base = OTHER; note = 2'-O-(2-methoxyethyl) ribonucleotide
  modified_base 2: mod_base = OTHER; note = 5-methyl cytidine
  modified_base 4: mod_base = OTHER; note = 5-methyl cytidine
  modified_base 6: mod_base = OTHER; note = 5-methyl cytidine
tctctctggtgtgtttttgagt

SEQ ID NO: 992 - RNA, 22 nt, synthetic construct
  source 1..22: mol_type = other RNA
  modified_base 1..22: mod_base = OTHER; note = Phosphorothioate linkage
  modified_base 1..22: mod_base = OTHER; note = 2'-O-(2-methoxyethyl) ribonucleotide
  modified_base 2: mod_base = OTHER; note = 5-methyl cytidine
  modified_base 4: mod_base = OTHER; note = 5-methyl cytidine
  modified_base 6: mod_base = OTHER; note = 5-methyl cytidine
tctctctggtgtgtttttgagt

SEQ ID NO: 993 - DNA, 20 bp, synthetic construct
  source 1..20: mol_type = other DNA
  modified_base 1..20: mod_base = OTHER; note = Phosphorothioate linkage
  modified_base 1..5: mod_base = OTHER; note = 2'-O-(2-methoxyethyl) ribonucleotide
  misc_feature 1..5: note = RNA
  misc_feature 6..15: note = DNA
  misc_feature 16..20: note = RNA
  modified_base 16..20: mod_base = OTHER; note = 2'-O-(2-methoxyethyl) ribonucleotide
  modified_base 3: mod_base = OTHER; note = 5-methyl cytidine
  modified_base 9..10: mod_base = OTHER; note = 5-methyl cytidine
  modified_base 14..16: mod_base = OTHER; note = 5-methyl cytidine
  modified_base 18: mod_base = OTHER; note = 5-methyl cytidine
ggcaagtgccaggcccacat

SEQ ID NO: 994 - DNA, 20 bp, synthetic construct
  source 1..20: mol_type = other DNA
  modified_base 1..20: mod_base = OTHER; note = Phosphorothioate linkage
  modified_base 1..3: mod_base = OTHER; note = 2'-O-(2-methoxyethyl) ribonucleotide
  modified_base 4: mod_base = OTHER; note = Locked nucleic acid
  modified_base 5: mod_base = OTHER; note = 2'-O-(2-methoxyethyl) ribonucleotide
  misc_feature 1..5: note = RNA
  misc_feature 6..15: note = DNA
  misc_feature 16..20: note = RNA
  modified_base 16: mod_base = OTHER; note = 2'-O-(2-methoxyethyl) ribonucleotide
  modified_base 17: mod_base = OTHER; note = Locked nucleic acid
  modified_base 18..20: mod_base = OTHER; note = 2'-O-(2-methoxyethyl) ribonucleotide
  modified_base 9: mod_base = OTHER; note = 5-methyl cytidine
  modified_base 13: mod_base = OTHER; note = 5-methyl cytidine
  modified_base 15: mod_base = OTHER; note = 5-methyl cytidine
tgaagtatctttctctgtgg

SEQ ID NO: 995 - DNA, 20 bp, synthetic construct
  source 1..20: mol_type = other DNA
  modified_base 1..20: mod_base = OTHER; note = Phosphorothioate linkage
  modified_base 1..3: mod_base = OTHER; note = 2'-O-(2-methoxyethyl) ribonucleotide
  modified_base 4: mod_base = OTHER; note = Locked nucleic acid
  modified_base 5: mod_base = OTHER; note = 2'-O-(2-methoxyethyl) ribonucleotide
  misc_feature 1..5: note = RNA
  misc_feature 6..15: note = DNA
  misc_feature 16..20: note = RNA
  modified_base 16..20: mod_base = OTHER; note = 2'-O-(2-methoxyethyl) ribonucleotide
  modified_base 9: mod_base = OTHER; note = 5-methyl cytidine
  modified_base 13: mod_base = OTHER; note = 5-methyl cytidine
  modified_base 15: mod_base = OTHER; note = 5-methyl cytidine
tgaagtatctttctctgtgg

SEQ ID NO: 996 - DNA, 20 bp, synthetic construct
  source 1..20: mol_type = other DNA
  modified_base 1..20: mod_base = OTHER; note = Phosphorothioate linkage
  modified_base 1..5: mod_base = OTHER; note = 2'-O-(2-methoxyethyl) ribonucleotide
  misc_feature 1..5: note = RNA
  misc_feature 6..15: note = DNA
  misc_feature 16..20: note = RNA
  modified_base 16: mod_base = OTHER; note = 2'-O-(2-methoxyethyl) ribonucleotide
  modified_base 17: mod_base = OTHER; note = Locked nucleic acid
  modified_base 18..20: mod_base = OTHER; note = 2'-O-(2-methoxyethyl) ribonucleotide
  modified_base 9: mod_base = OTHER; note = 5-methyl cytidine
  modified_base 13: mod_base = OTHER; note = 5-methyl cytidine
  modified_base 15: mod_base = OTHER; note = 5-methyl cytidine
tgaagtatctttctctgtgg

SEQ ID NO: 997 - DNA, 20 bp, synthetic construct
  source 1..20: mol_type = other DNA
  modified_base 1..20: mod_base = OTHER; note = Phosphorothioate linkage
  modified_base 1..4: mod_base = OTHER; note = 2'-O-(2-methoxyethyl) ribonucleotide
  modified_base 5: mod_base = OTHER; note = Locked nucleic acid
  misc_feature 1..5: note = RNA
  misc_feature 6..15: note = DNA
  misc_feature 16..20: note = RNA
  modified_base 16: mod_base = OTHER; note = Locked nucleic acid
  modified_base 17..20: mod_base = OTHER; note = 2'-O-(2-methoxyethyl) ribonucleotide
  modified_base 9: mod_base = OTHER; note = 5-methyl cytidine
  modified_base 13: mod_base = OTHER; note = 5-methyl cytidine
  modified_base 15: mod_base = OTHER; note = 5-methyl cytidine
tgaagtatctttctctgtgg

SEQ ID NO: 998 - DNA, 20 bp, synthetic construct
  source 1..20: mol_type = other DNA
  modified_base 1..20: mod_base = OTHER; note = Phosphorothioate linkage
  modified_base 1..4: mod_base = OTHER; note = 2'-O-(2-methoxyethyl) ribonucleotide
  modified_base 5: mod_base = OTHER; note = Locked nucleic acid
  misc_feature 1..5: note = RNA
  misc_feature 6..15: note = DNA
  misc_feature 16..20: note = RNA
  modified_base 16..20: mod_base = OTHER; note = 2'-O-(2-methoxyethyl) ribonucleotide
  modified_base 9: mod_base = OTHER; note = 5-methyl cytidine
  modified_base 13: mod_base = OTHER; note = 5-methyl cytidine
  modified_base 15: mod_base = OTHER; note = 5-methyl cytidine
tgaagtatctttctctgtgg

SEQ ID NO: 999 - DNA, 20 bp, synthetic construct
  source 1..20: mol_type = other DNA
  modified_base 1..20: mod_base = OTHER; note = Phosphorothioate linkage
  modified_base 1..5: mod_base = OTHER; note = 2'-O-(2-methoxyethyl) ribonucleotide
  misc_feature 1..5: note = RNA
  misc_feature 6..15: note = DNA
  misc_feature 16..20: note = RNA
  modified_base 16: mod_base = OTHER; note = Locked nucleic acid
  modified_base 17..20: mod_base = OTHER; note = 2'-O-(2-methoxyethyl) ribonucleotide
  modified_base 9: mod_base = OTHER; note = 5-methyl cytidine
  modified_base 13: mod_base = OTHER; note = 5-methyl cytidine
  modified_base 15: mod_base = OTHER; note = 5-methyl cytidine
tgaagtatctttctctgtgg

SEQ ID NO: 1000 - DNA, 20 bp, synthetic construct
  source 1..20: mol_type = other DNA
  modified_base 1..20: mod_base = OTHER; note = Phosphorothioate linkage
  modified_base 1..3: mod_base = OTHER; note = 2'-O-(2-methoxyethyl) ribonucleotide
  modified_base 4..5: mod_base = OTHER; note = Locked nucleic acid
  misc_feature 1..5: note = RNA
  misc_feature 6..15: note = DNA
  misc_feature 16..20: note = RNA
  modified_base 16..20: mod_base = OTHER; note = 2'-O-(2-methoxyethyl) ribonucleotide
  modified_base 9: mod_base = OTHER; note = 5-methyl cytidine
  modified_base 13: mod_base = OTHER; note = 5-methyl cytidine
  modified_base 15: mod_base = OTHER; note = 5-methyl cytidine
tgaagtatctttctctgtgg

SEQ ID NO: 1001 - DNA, 20 bp, synthetic construct
  source 1..20: mol_type = other DNA
  modified_base 1..20: mod_base = OTHER; note = Phosphorothioate linkage
  modified_base 1..5: mod_base = OTHER; note = 2'-O-(2-methoxyethyl) ribonucleotide
  misc_feature 1..5: note = RNA
  misc_feature 6..15: note = DNA
  misc_feature 16..20: note = RNA
  modified_base 16..17: mod_base = OTHER; note = Locked nucleic acid
  modified_base 18..20: mod_base = OTHER; note = 2'-O-(2-methoxyethyl) ribonucleotide
  modified_base 9: mod_base = OTHER; note = 5-methyl cytidine
  modified_base 13: mod_base = OTHER; note = 5-methyl cytidine
  modified_base 15: mod_base = OTHER; note = 5-methyl cytidine
tgaagtatctttctctgtgg

SEQ ID NO: 1002 - DNA, 32 bp, synthetic construct
  source 1..32: mol_type = other DNA
  modified_base 1..32: mod_base = OTHER; note = Phosphorothioate linkage
  modified_base 1..5: mod_base = OTHER; note = 2'-O-(2-methoxyethyl) ribonucleotide
  misc_feature 1..5: note = RNA
  misc_feature 6..15: note = DNA
  misc_feature 16..32: note = RNA
  modified_base 16..32: mod_base = OTHER; note = 2'-O-(2-methoxyethyl) ribonucleotide
  modified_base 4..5: mod_base = OTHER; note = 5-methyl cytidine
  modified_base 7: mod_base = OTHER; note = 5-methyl cytidine
  modified_base 11: mod_base = OTHER; note = 5-methyl cytidine
  modified_base 13: mod_base = OTHER; note = 5-methyl cytidine
  modified_base 15: mod_base = OTHER; note = 5-methyl cytidine
  modified_base 17: mod_base = OTHER; note = 5-methyl cytidine
ggacctctgtctctctctggtgtgtttttgag

SEQ ID NO: 1003 - RNA, 19 nt, synthetic construct
  source 1..19: mol_type = other RNA
  modified_base 1..19: mod_base = OTHER; note = Phosphorothioate linkage
  modified_base 1..19: mod_base = OTHER; note = 2'-O-(2-methoxyethyl) ribonucleotide
  modified_base 2: mod_base = OTHER; note = 5-methyl cytidine
  modified_base 4: mod_base = OTHER; note = 5-methyl cytidine
tctctggtgtgtttttgag

SEQ ID NO: 1004 - RNA, 20 nt, synthetic construct
  source 1..20: mol_type = other RNA
taccgggggcgggtgctaca

SEQ ID NO: 1005 - RNA, 20 nt, synthetic construct
  source 1..20: mol_type = other RNA
aggacctaccgggggcgggt

SEQ ID NO: 1006 - RNA, 20 nt, synthetic construct
  source 1..20: mol_type = other RNA
cccctctcaggacctaccgg

SEQ ID NO: 1007 - RNA, 20 nt, synthetic construct
  source 1..20: mol_type = other RNA
gggcctgtgccctcctacta

SEQ ID NO: 1008 - RNA, 20 nt, synthetic construct
  source 1..20: mol_type = other RNA
aggacaccctgggcctgtgc

SEQ ID NO: 1009 - RNA, 20 nt, synthetic construct
  source 1..20: mol_type = other RNA
ttgcgaggacaccctgggcc

SEQ ID NO: 1010 - RNA, 20 nt, synthetic construct
  source 1..20: mol_type = other RNA
gcccgttgcgaggacaccct

SEQ ID NO: 1011 - RNA, 20 nt, synthetic construct
  source 1..20: mol_type = other RNA
gggacgcccgttgcgaggac

SEQ ID NO: 1012 - RNA, 20 nt, synthetic construct
  source 1..20: mol_type = other RNA
tccccgggacgcccgttgcg

SEQ ID NO: 1013 - RNA, 20 nt, synthetic construct
  source 1..20: mol_type = other RNA
ttcagcagctccccgggacg

SEQ ID NO: 1014 - RNA, 20 nt, synthetic construct
  source 1..20: mol_type = other RNA
aggacttcagcagctccccg

SEQ ID NO: 1015 - RNA, 20 nt, synthetic construct
  source 1..20: mol_type = other RNA
cggggaggacttcagcagct

SEQ ID NO: 1016 - RNA, 20 nt, synthetic construct
  source 1..20: mol_type = other RNA
tctgcagcggggaggacttc

SEQ ID NO: 1017 - RNA, 20 nt, synthetic construct
  source 1..20: mol_type = other RNA
cggtcctctgcagcggggag

SEQ ID NO: 1018 - RNA, 20 nt, synthetic construct
  source 1..20: mol_type = other RNA
cctctcggtcctctgcagcg

SEQ ID NO: 1019 - RNA, 20 nt, synthetic construct
  source 1..20: mol_type = other RNA
gccctgcctctcggtcctct

SEQ ID NO: 1020 - RNA, 20 nt, synthetic construct
  source 1..20: mol_type = other RNA
cccgggccctgcctctcggt

SEQ ID NO: 1021 - RNA, 20 nt, synthetic construct
  source 1..20: mol_type = other RNA
tgttctctcccgggccctgc

SEQ ID NO: 1022 - RNA, 20 nt, synthetic construct
  source 1..20: mol_type = other RNA
cgggctgttctctcccgggc

SEQ ID NO: 1023 - RNA, 20 nt, synthetic construct
  source 1..20: mol_type = other RNA
tccgaccgggctgttctctc

SEQ ID NO: 1024 - RNA, 20 nt, synthetic construct
  source 1..20: mol_type = other RNA
caccccctccgaccgggctg

SEQ ID NO: 1025 - RNA, 20 nt, synthetic construct
  source 1..20: mol_type = other RNA
gacggcccaccccctccgac

SEQ ID NO: 1026 - RNA, 20 nt, synthetic construct
  source 1..20: mol_type = other RNA
cggctgacggcccaccccct

SEQ ID NO: 1027 - RNA, 20 nt, synthetic construct
  source 1..20: mol_type = other RNA
tttccggggcggctgacggc

SEQ ID NO: 1028 - RNA, 20 nt, synthetic construct
  source 1..20: mol_type = other RNA
gcagctttccggggcggctg

SEQ ID NO: 1029 - RNA, 20 nt, synthetic construct
  source 1..20: mol_type = other RNA
gaaacgcagctttccggggc

SEQ ID NO: 1030 - RNA, 20 nt, synthetic construct
  source 1..20: mol_type = other RNA
atcaccgggaaacgcagctt

SEQ ID NO: 1031 - RNA, 20 nt, synthetic construct
  source 1..20: mol_type = other RNA
acttaatcaccgggaaacgc

SEQ ID NO: 1032 - RNA, 20 nt, synthetic construct
  source 1..20: mol_type = other RNA
gtgctacacttaatcaccgg

SEQ ID NO: 1033 - RNA, 20 nt, synthetic construct
  source 1..20: mol_type = other RNA
ggcgggtgctacacttaatc

SEQ ID NO: 1034 - RNA, 20 nt, synthetic construct
  source 1..20: mol_type = other RNA
ctaatctcgcccctctcagg

SEQ ID NO: 1035 - RNA, 20 nt, synthetic construct
  source 1..20: mol_type = other RNA
agtacccaactaatctcgcc

SEQ ID NO: 1036 - RNA, 20 nt, synthetic construct
  source 1..20: mol_type = other RNA
tggtaagtacccaactaatc

SEQ ID NO: 1037 - RNA, 20 nt, synthetic construct
  source 1..20: mol_type = other RNA
gcccacatggtaagtaccca

SEQ ID NO: 1038 - RNA, 20 nt, synthetic construct
  source 1..20: mol_type = other RNA
gccaggcccacatggtaagt

SEQ ID NO: 1039 - RNA, 20 nt, synthetic construct
  source 1..20: mol_type = other RNA
gatgtgggcaagtgccaggc

SEQ ID NO: 1040 - RNA, 20 nt, synthetic construct
  source 1..20: mol_type = other RNA
aaagtgatgtgggcaagtgc

SEQ ID NO: 1041 - RNA, 20 nt, synthetic construct
  source 1..20: mol_type = other RNA
gacacaaagtgatgtgggca

SEQ ID NO: 1042 - RNA, 20 nt, synthetic construct
  source 1..20: mol_type = other RNA
ccggtgggaagacacaaagt

SEQ ID NO: 1043 - RNA, 20 nt, synthetic construct
  source 1..20: mol_type = other RNA
cgcagggccggtgggaagac

SEQ ID NO: 1044 - RNA, 20 nt, synthetic construct
  source 1..20: mol_type = other RNA
accctcgcagggccggtggg

SEQ ID NO: 1045 - RNA, 20 nt, synthetic construct
  source 1..20: mol_type = other RNA
cccccaccctcgcagggccg

SEQ ID NO: 1046 - RNA, 20 nt, synthetic construct
  source 1..20: mol_type = other RNA
ggcaacccccaccctcgcag

SEQ ID NO: 1047 - RNA, 20 nt, synthetic construct
  source 1..20: mol_type = other RNA
tgaggacggcaacccccacc

SEQ ID NO: 1048 - RNA, 20 nt, synthetic construct
  source 1..20: mol_type = other RNA
ggaaactgaggacggcaacc

SEQ ID NO: 1049 - RNA, 20 nt, synthetic construct
  source 1..20: mol_type = other RNA
cgcctggaaactgaggacgg

SEQ ID NO: 1050 - RNA, 20 nt, synthetic construct
  source 1..20: mol_type = other RNA
ttcccccgcctggaaactga

SEQ ID NO: 1051 - RNA, 20 nt, synthetic construct
  source 1..20: mol_type = other RNA
gcccgtttcccccgcctgga

SEQ ID NO: 1052 - RNA, 20 nt, synthetic construct
  source 1..20: mol_type = other RNA
ttccagcccgtttcccccgc

SEQ ID NO: 1053 - RNA, 20 nt, synthetic construct
  source 1..20: mol_type = other RNA
agtgacgcttccagcccgtt

SEQ ID NO: 1054 - RNA, 20 nt, synthetic construct
  source 1..20: mol_type = other RNA
ttagctgagtgacgcttcca

SEQ ID NO: 1055 - RNA, 20 nt, synthetic construct
  source 1..20: mol_type = other RNA
ctactattagctgagtgacg

SEQ ID NO: 1056 - RNA, 20 nt, synthetic construct
  source 1..20: mol_type = other RNA
gtccactactattagctgag

SEQ ID NO: 1057 - RNA, 20 nt, synthetic construct
  source 1..20: mol_type = other RNA
agtcccaggtccactactat

SEQ ID NO: 1058 - RNA, 20 nt, synthetic construct
  source 1..20: mol_type = other RNA
gcaaatctgagttccagtcc

SEQ ID NO: 1059 - RNA, 20 nt, synthetic construct
  source 1..20: mol_type = other RNA
tccttagcaaatctgagttc

SEQ ID NO: 1060 - RNA, 20 nt, synthetic construct
  source 1..20: mol_type = other RNA
cctggttccttagcaaatct

SEQ ID NO: 1061 - RNA, 20 nt, synthetic construct
  source 1..20: mol_type = other RNA
aacctgcctggttccttagc

SEQ ID NO: 1062 - RNA, 20 nt, synthetic construct
  source 1..20: mol_type = other RNA
ggaaagaacctgcctggttc

SEQ ID NO: 1063 - RNA, 20 nt, synthetic construct
  source 1..20: mol_type = other RNA
tcccgtgcagaaaacaggaa

SEQ ID NO: 1064 - RNA, 20 nt, synthetic construct
  source 1..20: mol_type = other RNA
aatgctcccgtgcagaaaac

SEQ ID NO: 1065 - RNA, 20 nt, synthetic construct
  source 1..20: mol_type = other RNA
ggttaaaatgctcccgtgca

SEQ ID NO: 1066 - RNA, 20 nt, synthetic construct
  source 1..20: mol_type = other RNA
attgctggttaaaatgctcc

SEQ ID NO: 1067 - RNA, 20 nt, synthetic construct
  source 1..20: mol_type = other RNA
ctttaattgctggttaaaat

SEQ ID NO: 1068 - RNA, 20 nt, synthetic construct
  source 1..20: mol_type = other RNA
aggtttctttaattgctggt

SEQ ID NO: 1069 - RNA, 20 nt, synthetic construct
  source 1..20: mol_type = other RNA
gaaataaggtttctttaatt

SEQ ID NO: 1070 - RNA, 20 nt, synthetic construct
  source 1..20: mol_type = other RNA
ttacctagaaataaggtttc

SEQ ID NO: 1071 - RNA, 18 nt, synthetic construct
  source 1..18: mol_type = other RNA
tggttaaaatgctcccgt

SEQ ID NO: 1072 - RNA, 18 nt, synthetic construct
  source 1..18: mol_type = other RNA
ggttaaaatgctcccgtg

SEQ ID NO: 1073 - RNA, 18 nt, synthetic construct
  source 1..18: mol_type = other RNA
gttaaaatgctcccgtgc

SEQ ID NO: 1074 - RNA, 18 nt, synthetic construct
  source 1..18: mol_type = other RNA
aatgctcccgtgcagaaa

SEQ ID NO: 1075 - RNA, 18 nt, synthetic construct
  source 1..18: mol_type = other RNA
atgctcccgtgcagaaaa

SEQ ID NO: 1076 - RNA, 18 nt, synthetic construct
  source 1..18: mol_type = other RNA
ctcccgtgcagaaaacag

SEQ ID NO: 1077 - RNA, 18 nt, synthetic construct
  source 1..18: mol_type = other RNA
cccgtgcagaaaacagga

SEQ ID NO: 1078 - RNA, 18 nt, synthetic construct
  source 1..18: mol_type = other RNA
aaagaacctgcctggttc

SEQ ID NO: 1079 - RNA, 18 nt, synthetic construct
  source 1..18: mol_type = other RNA
aacctgcctggttcctta

SEQ ID NO: 1080 - RNA, 18 nt, synthetic construct
  source 1..18: mol_type = other RNA
acctgcctggttccttag

SEQ ID NO: 1081 - RNA, 18 nt, synthetic construct
  source 1..18: mol_type = other RNA
ttagcaaatctgagttcc

SEQ ID NO: 1082 - RNA, 18 nt, synthetic construct
  source 1..18: mol_type = other RNA
ccagtcccaggtccacta

SEQ ID NO: 1083 - RNA, 18 nt, synthetic construct
  source 1..18: mol_type = other RNA
aggtccactactattagc

SEQ ID NO: 1084 - RNA, 18 nt, synthetic construct
  source 1..18: mol_type = other RNA
ggtccactactattagct

SEQ ID NO: 1085 - RNA, 18 nt, synthetic construct
  source 1..18: mol_type = other RNA
tccactactattagctga

SEQ ID NO: 1086 - RNA, 18 nt, synthetic construct
  source 1..18: mol_type = other RNA
ctattagctgagtgacgc

SEQ ID NO: 1087 - RNA, 18 nt, synthetic construct
  source 1..18: mol_type = other RNA
attagctgagtgacgctt

SEQ ID NO: 1088 - RNA, 18 nt, synthetic construct
  source 1..18: mol_type = other RNA
ttagctgagtgacgcttc

SEQ ID NO: 1089 - RNA, 18 nt, synthetic construct
  source 1..18: mol_type = other RNA
tagctgagtgacgcttcc

SEQ ID NO: 1090 - RNA, 18 nt, synthetic construct
  source 1..18: mol_type = other RNA
tgagtgacgcttccagcc

SEQ ID NO: 1091 - RNA, 18 nt, synthetic construct
  source 1..18: mol_type = other RNA
gagtgacgcttccagccc

SEQ ID NO: 1092 - RNA, 18 nt, synthetic construct
  source 1..18: mol_type = other RNA
agtgacgcttccagcccg

SEQ ID NO: 1093 - RNA, 18 nt, synthetic construct
  source 1..18: mol_type = other RNA
gtgacgcttccagcccgt

SEQ ID NO: 1094 - RNA, 18 nt, synthetic construct
  source 1..18: mol_type = other RNA
gacgcttccagcccgttt

SEQ ID NO: 1095 - RNA, 18 nt, synthetic construct
  source 1..18: mol_type = other RNA
cgcttccagcccgtttcc

SEQ ID NO: 1096 - RNA, 18 nt, synthetic construct
  source 1..18: mol_type = other RNA
cagcccgtttcccccgcc

SEQ ID NO: 1097 - RNA, 18 nt, synthetic construct
  source 1..18: mol_type = other RNA
cgtttcccccgcctggaa

SEQ ID NO: 1098 - RNA, 18 nt, synthetic construct
  source 1..18: mol_type = other RNA
tttcccccgcctggaaac

SEQ ID NO: 1099 - RNA, 18 nt, synthetic construct
  source 1..18: mol_type = other RNA
cccccgcctggaaactga

SEQ ID NO: 1100 - RNA, 18 nt, synthetic construct
  source 1..18: mol_type = other RNA
cgcctggaaactgaggac

SEQ ID NO: 1101 - RNA, 18 nt, synthetic construct
  source 1..18: mol_type = other RNA
gcctggaaactgaggacg

SEQ ID NO: 1102 - RNA, 18 nt, synthetic construct
  source 1..18: mol_type = other RNA
cctggaaactgaggacgg

SEQ ID NO: 1103 - RNA, 18 nt, synthetic construct
  source 1..18: mol_type = other RNA
ctgaggacggcaaccccc

SEQ ID NO: 1104 - RNA, 18 nt, synthetic construct
  source 1..18: mol_type = other RNA
tgaggacggcaaccccca

SEQ ID NO: 1105 - RNA, 18 nt, synthetic construct
  source 1..18: mol_type = other RNA
aggacggcaacccccacc

SEQ ID NO: 1106 - RNA, 18 nt, synthetic construct
  source 1..18: mol_type = other RNA
caccctcgcagggccggt

SEQ ID NO: 1107 - RNA, 18 nt, synthetic construct
  source 1..18: mol_type = other RNA
accctcgcagggccggtg

SEQ ID NO: 1108 - RNA, 18 nt, synthetic construct
  source 1..18: mol_type = other RNA
ctcgcagggccggtggga

SEQ ID NO: 1109 - RNA, 18 nt, synthetic construct
  source 1..18: mol_type = other RNA
tcgcagggccggtgggaa

SEQ ID NO: 1110 - RNA, 18 nt, synthetic construct
  source 1..18: mol_type = other RNA
gggccggtgggaagacac

SEQ ID NO: 1111 - RNA, 18 nt, synthetic construct
  source 1..18: mol_type = other RNA
ggccggtgggaagacaca

SEQ ID NO: 1112 - RNA, 18 nt, synthetic construct
  source 1..18: mol_type = other RNA
acacaaagtgatgtgggc

SEQ ID NO: 1113 - RNA, 18 nt, synthetic construct
  source 1..18: mol_type = other RNA
tgatgtgggcaagtgcca

SEQ ID NO: 1114 - RNA, 18 nt, synthetic construct
  source 1..18: mol_type = other RNA
gatgtgggcaagtgccag

SEQ ID NO: 1115 - RNA, 18 nt, synthetic construct
  source 1..18: mol_type = other RNA
agtacccaactaatctcg

SEQ ID NO: 1116 - RNA, 18 nt, synthetic construct
  source 1..18: mol_type = other RNA
gtacccaactaatctcgc

SEQ ID NO: 1117 - RNA, 18 nt, synthetic construct
  source 1..18: mol_type = other RNA
tacccaactaatctcgcc

SEQ ID NO: 1118 - RNA, 18 nt, synthetic construct
  source 1..18: mol_type = other RNA
cccaactaatctcgcccc

SEQ ID NO: 1119 - RNA, 18 nt, synthetic construct
  source 1..18: mol_type = other RNA
ccaactaatctcgcccct

SEQ ID NO: 1120 - RNA, 18 nt, synthetic construct
  source 1..18: mol_type = other RNA
caactaatctcgcccctc

SEQ ID NO: 1121 - RNA, 18 nt, synthetic construct
  source 1..18: mol_type = other RNA
aactaatctcgcccctct

SEQ ID NO: 1122 - RNA, 18 nt, synthetic construct
  source 1..18: mol_type = other RNA
actaatctcgcccctctc

SEQ ID NO: 1123 - RNA, 18 nt, synthetic construct
  source 1..18: mol_type = other RNA
taatctcgcccctctcag

SEQ ID NO: 1124 - RNA, 18 nt, synthetic construct
  source 1..18: mol_type = other RNA
aatctcgcccctctcagg

SEQ ID NO: 1125 - RNA, 18 nt, synthetic construct
  source 1..18: mol_type = other RNA
cgcccctctcaggaccta

SEQ ID NO: 1126 - RNA, 19 nt, synthetic construct
  source 1..19: mol_type = other RNA
attacctagaaataaggtt

SEQ ID NO: 1127 - RNA, 19 nt, synthetic construct
  source 1..19: mol_type = other RNA
tacctagaaataaggtttc

SEQ ID NO: 1128 - RNA, 19 nt, synthetic construct
  source 1..19: mol_type = other RNA
acctagaaataaggtttct

SEQ ID NO: 1129 - RNA, 19 nt, synthetic construct
  source 1..19: mol_type = other RNA
cctagaaataaggtttctt

SEQ ID NO: 1130 - RNA, 19 nt, synthetic construct
  source 1..19: mol_type = other RNA
tagaaataaggtttcttta

SEQ ID NO: 1131 - RNA, 19 nt, synthetic construct
  source 1..19: mol_type = other RNA
ataaggtttctttaattgc

SEQ ID NO: 1132 - RNA, 19 nt, synthetic construct
  source 1..19: mol_type = other RNA
aaggtttctttaattgctg

SEQ ID NO: 1133 - RNA, 19 nt, synthetic construct
  source 1..19: mol_type = other RNA
gtttctttaattgctggtt

SEQ ID NO: 1134 - RNA, 19 nt, synthetic construct
  source 1..19: mol_type = other RNA
ttctttaattgctggttaa

SEQ ID NO: 1135 - RNA, 19 nt, synthetic construct
  source 1..19: mol_type = other RNA
tctttaattgctggttaaa

SEQ ID NO: 1136 - RNA, 19 nt, synthetic construct
  source 1..19: mol_type = other RNA
ctttaattgctggttaaaa

SEQ ID NO: 1137 - RNA, 19 nt, synthetic construct
  source 1..19: mol_type = other RNA
taattgctggttaaaatgc

SEQ ID NO: 1138 - RNA, 19 nt, synthetic construct
  source 1..19: mol_type = other RNA
aattgctggttaaaatgct

SEQ ID NO: 1139 - RNA, 19 nt, synthetic construct
  source 1..19: mol_type = other RNA
attgctggttaaaatgctc

SEQ ID NO: 1140 - RNA, 19 nt, synthetic construct
  source 1..19: mol_type = other RNA
gctggttaaaatgctcccg

SEQ ID NO: 1141 - RNA, 19 nt, synthetic construct
  source 1..19: mol_type = other RNA
ctggttaaaatgctcccgt

SEQ ID NO: 1142 - RNA, 19 nt, synthetic construct
  source 1..19: mol_type = other RNA
tggttaaaatgctcccgtg

SEQ ID NO: 1143 - RNA, 19 nt, synthetic construct
  source 1..19: mol_type = other RNA
ggttaaaatgctcccgtgc

SEQ ID NO: 1144 - RNA, 19 nt, synthetic construct
  source 1..19: mol_type = other RNA
gttaaaatgctcccgtgca

SEQ ID NO: 1145 - RNA, 19 nt, synthetic construct
  source 1..19: mol_type = other RNA
aaatgctcccgtgcagaaa

SEQ ID NO: 1146 - RNA, 19 nt, synthetic construct
  source 1..19: mol_type = other RNA
aatgctcccgtgcagaaaa

SEQ ID NO: 1147 - RNA, 19 nt, synthetic construct
  source 1..19: mol_type = other RNA
atgctcccgtgcagaaaac

SEQ ID NO: 1148 - RNA, 19 nt, synthetic construct
  source 1..19: mol_type = other RNA
gctcccgtgcagaaaacag

SEQ ID NO: 1149 - RNA, 19 nt, synthetic construct
  source 1..19: mol_type = other RNA
ctcccgtgcagaaaacagg

SEQ ID NO: 1150 - RNA, 19 nt, synthetic construct
  source 1..19: mol_type = other RNA
tcccgtgcagaaaacagga

SEQ ID NO: 1151 - RNA, 19 nt, synthetic construct
  source 1..19: mol_type = other RNA
cccgtgcagaaaacaggaa

SEQ ID NO: 1152 - RNA, 19 nt, synthetic construct
  source 1..19: mol_type = other RNA
cgtgcagaaaacaggaaag

SEQ ID NO: 1153 - RNA, 19 nt, synthetic construct
  source 1..19: mol_type = other RNA
acaggaaagaacctgcctg

SEQ ID NO: 1154 - RNA, 19 nt, synthetic construct
  source 1..19: mol_type = other RNA
gaaagaacctgcctggttc

SEQ ID NO: 1155 - RNA, 19 nt, synthetic construct
  source 1..19: mol_type = other RNA
aaagaacctgcctggttcc

SEQ ID NO: 1156 - RNA, 19 nt, synthetic construct
  source 1..19: mol_type = other RNA
agaacctgcctggttcctt

SEQ ID NO: 1157 - RNA, 19 nt, synthetic construct
  source 1..19: mol_type = other RNA
gaacctgcctggttcctta

SEQ ID NO: 1158 - RNA, 19 nt, synthetic construct
  source 1..19: mol_type = other RNA
aacctgcctggttccttag

SEQ ID NO: 1159 - RNA, 19 nt, synthetic construct
  source 1..19: mol_type = other RNA
acctgcctggttccttagc

SEQ ID NO: 1160 - RNA, 19 nt, synthetic construct
  source 1..19: mol_type = other RNA
ctgcctggttccttagcaa

SEQ ID NO: 1161 - RNA, 19 nt, synthetic construct
  source 1..19: mol_type = other RNA
tgcctggttccttagcaaa

SEQ ID NO: 1162 - RNA, 19 nt, synthetic construct
  source 1..19: mol_type = other RNA
gcctggttccttagcaaat

SEQ ID NO: 1163 - RNA, 19 nt, synthetic construct
  source 1..19: mol_type = other RNA
cctggttccttagcaaatc

SEQ ID NO: 1164 - RNA, 19 nt, synthetic construct
  source 1..19: mol_type = other RNA
tggttccttagcaaatctg

SEQ ID NO: 1165 - RNA, 19 nt, synthetic construct
  source 1..19: mol_type = other RNA
ccttagcaaatctgagttc

SEQ ID NO: 1166 - RNA, 19 nt, synthetic construct
  source 1..19: mol_type = other RNA
cttagcaaatctgagttcc

SEQ ID NO: 1167 - RNA, 19 nt, synthetic construct
  source 1..19: mol_type = other RNA
ttagcaaatctgagttcca

SEQ ID NO: 1168 - RNA, 19 nt, synthetic construct
  source 1..19: mol_type = other RNA
tagcaaatctgagttccag

SEQ ID NO: 1169 - RNA, 19 nt, synthetic construct
  source 1..19: mol_type = other RNA
ttccagtcccaggtccact

SEQ ID NO: 1170 - RNA, 19 nt, synthetic construct
  source 1..19: mol_type = other RNA
tccagtcccaggtccacta

SEQ ID NO: 1171 - RNA, 19 nt, synthetic construct
  source 1..19: mol_type = other RNA
ccagtcccaggtccactac

SEQ ID NO: 1172 - RNA, 19 nt, synthetic construct
  source 1..19: mol_type = other RNA
gtcccaggtccactactat

SEQ ID NO: 1173 - RNA, 19 nt, synthetic construct
  source 1..19: mol_type = other RNA
ccaggtccactactattag

SEQ ID NO: 1174 - RNA, 19 nt, synthetic construct
  source 1..19: mol_type = other RNA
caggtccactactattagc

SEQ ID NO: 1175 - RNA, 19 nt, synthetic construct
  source 1..19: mol_type = other RNA
aggtccactactattagct

SEQ ID NO: 1176 - RNA, 19 nt, synthetic construct
  source 1..19: mol_type = other RNA
ggtccactactattagctg

SEQ ID NO: 1177 - RNA, 19 nt, synthetic construct
  source 1..19: mol_type = other RNA
gtccactactattagctga

SEQ ID NO: 1178 - RNA, 19 nt, synthetic construct
  source 1..19: mol_type = other RNA
tccactactattagctgag

SEQ ID NO: 1179 - RNA, 19 nt, synthetic construct
  source 1..19: mol_type = other RNA
tactattagctgagtgacg

SEQ ID NO: 1180 - RNA, 19 nt, synthetic construct
  source 1..19: mol_type = other RNA
actattagctgagtgacgc

SEQ ID NO: 1181 - RNA, 19 nt, synthetic construct
  source 1..19: mol_type = other RNA
ctattagctgagtgacgct

SEQ ID NO: 1182 - RNA, 19 nt, synthetic construct
  source 1..19: mol_type = other RNA
tattagctgagtgacgctt

SEQ ID NO: 1183 - RNA, 19 nt, synthetic construct
  source 1..19: mol_type = other RNA
attagctgagtgacgcttc

SEQ ID NO: 1184 - RNA, 19 nt, synthetic construct
  source 1..19: mol_type = other RNA
ttagctgagtgacgcttcc

SEQ ID NO: 1185 - RNA, 19 nt, synthetic construct
  source 1..19: mol_type = other RNA
tagctgagtgacgcttcca

SEQ ID NO: 1186 - RNA, 19 nt, synthetic construct
  source 1..19: mol_type = other RNA
agctgagtgacgcttccag

SEQ ID NO: 1187 - RNA, 19 nt, synthetic construct
  source 1..19: mol_type = other RNA
gctgagtgacgcttccagc

SEQ ID NO: 1188 - RNA, 19 nt, synthetic construct
  source 1..19: mol_type = other RNA
ctgagtgacgcttccagcc

SEQ ID NO: 1189 - RNA, 19 nt, synthetic construct
  source 1..19: mol_type = other RNA
tgagtgacgcttccagccc

SEQ ID NO: 1190 - RNA, 19 nt, synthetic construct
  source 1..19: mol_type = other RNA
gagtgacgcttccagcccg

SEQ ID NO: 1191 - RNA, 19 nt, synthetic construct
  source 1..19: mol_type = other RNA
agtgacgcttccagcccgt

SEQ ID NO: 1192 - RNA, 19 nt, synthetic construct
  source 1..19: mol_type = other RNA
gtgacgcttccagcccgtt

SEQ ID NO: 1193 - RNA, 19 nt, synthetic construct
  source 1..19: mol_type = other RNA
tgacgcttccagcccgttt

SEQ ID NO: 1194 - RNA, 19 nt, synthetic construct
  source 1..19: mol_type = other RNA
gacgcttccagcccgtttc

SEQ ID NO: 1195 - RNA, 19 nt, synthetic construct
  source 1..19: mol_type = other RNA
acgcttccagcccgtttcc

SEQ ID NO: 1196 - RNA, 19 nt, synthetic construct
  source 1..19: mol_type = other RNA
cgcttccagcccgtttccc

SEQ ID NO: 1197 - RNA, 19 nt, synthetic construct
  source 1..19: mol_type = other RNA
cttccagcccgtttccccc

SEQ ID NO: 1198 - RNA, 19 nt, synthetic construct
  source 1..19: mol_type = other RNA
ttccagcccgtttcccccg

SEQ ID NO: 1199 - RNA, 19 nt, synthetic construct
  source 1..19: mol_type = other RNA
tccagcccgtttcccccgc

SEQ ID NO: 1200 - RNA, 19 nt, synthetic construct
  source 1..19: mol_type = other RNA
ccagcccgtttcccccgcc

SEQ ID NO: 1201 - RNA, 19 nt, synthetic construct
  source 1..19: mol_type = other RNA
cagcccgtttcccccgcct

SEQ ID NO: 1202 - RNA, 19 nt, synthetic construct
  source 1..19: mol_type = other RNA
ccgtttcccccgcctggaa

SEQ ID NO: 1203 - RNA, 19 nt, synthetic construct
  source 1..19: mol_type = other RNA
cgtttcccccgcctggaaa

SEQ ID NO: 1204 - RNA, 19 nt, synthetic construct
  source 1..19: mol_type = other RNA
gtttcccccgcctggaaac

SEQ ID NO: 1205 - RNA, 19 nt, synthetic construct
  source 1..19: mol_type = other RNA
tttcccccgcctggaaact

SEQ ID NO: 1206 - RNA, 19 nt, synthetic construct
  source 1..19: mol_type = other RNA
tcccccgcctggaaactga

SEQ ID NO: 1207 - RNA, 19 nt, synthetic construct
  source 1..19: mol_type = other RNA
cccccgcctggaaactgag

SEQ ID NO: 1208 - RNA, 19 nt, synthetic construct
  source 1..19: mol_type = other RNA
ccgcctggaaactgaggac

SEQ ID NO: 1209 - RNA, 19 nt, synthetic construct
  source 1..19: mol_type = other RNA
cgcctggaaactgaggacg

SEQ ID NO: 1210 - RNA, 19 nt, synthetic construct
  source 1..19: mol_type = other RNA
gcctggaaactgaggacgg

SEQ ID NO: 1211 - RNA, 19 nt, synthetic construct
  source 1..19: mol_type = other RNA
cctggaaactgaggacggc

SEQ ID NO: 1212 - RNA, 19 nt, synthetic construct
  source 1..19: mol_type = other RNA
ctggaaactgaggacggca

SEQ ID NO: 1213 - RNA, 19 nt, synthetic construct
  source 1..19: mol_type = other RNA
tggaaactgaggacggcaa

SEQ ID NO: 1214 - RNA, 19 nt, synthetic construct
  source 1..19: mol_type = other RNA
ggaaactgaggacggcaac

SEQ ID NO: 1215 - RNA, 19 nt, synthetic construct
  source 1..19: mol_type = other RNA
actgaggacggcaaccccc

SEQ ID NO: 1216 - RNA, 19 nt, synthetic construct
  source 1..19: mol_type = other RNA
ctgaggacggcaaccccca

SEQ ID NO: 1217 - RNA, 19 nt, synthetic construct
  source 1..19: mol_type = other RNA
tgaggacggcaacccccac

SEQ ID NO: 1218 - RNA, 19 nt, synthetic construct
  source 1..19: mol_type = other RNA
gaggacggcaacccccacc

SEQ ID NO: 1219 - RNA, 19 nt, synthetic construct
  source 1..19: mol_type = other RNA
aggacggcaacccccaccc

SEQ ID NO: 1220 - RNA, 19 nt, synthetic construct
  source 1..19: mol_type = other RNA
ggcaacccccaccctcgca

SEQ ID NO: 1221 - RNA, 19 nt, synthetic construct
  source 1..19: mol_type = other RNA
aacccccaccctcgcaggg

SEQ ID NO: 1222 - RNA, 19 nt, synthetic construct
  source 1..19: mol_type = other RNA
ccaccctcgcagggccggt

SEQ ID NO: 1223 - RNA, 19 nt, synthetic construct
  source 1..19: mol_type = other RNA
caccctcgcagggccggtg

SEQ ID NO: 1224 - RNA, 19 nt, synthetic construct
  source 1..19: mol_type = other RNA
accctcgcagggccggtgg

SEQ ID NO: 1225 - RNA, 19 nt, synthetic construct
  source 1..19: mol_type = other RNA
cctcgcagggccggtggga

SEQ ID NO: 1226 - RNA, 19 nt, synthetic construct
  source 1..19: mol_type = other RNA
ctcgcagggccggtgggaa

SEQ ID NO: 1227 - RNA, 19 nt, synthetic construct
  source 1..19: mol_type = other RNA
tcgcagggccggtgggaag

SEQ ID NO: 1228 - RNA, 19 nt, synthetic construct
  source 1..19: mol_type = other RNA
cgcagggccggtgggaaga

SEQ ID NO: 1229 - RNA, 19 nt, synthetic construct
  source 1..19: mol_type = other RNA
gcagggccggtgggaagac

SEQ ID NO: 1230 - RNA, 19 nt, synthetic construct
  source 1..19: mol_type = other RNA
cagggccggtgggaagaca

SEQ ID NO: 1231 - RNA, 19 nt, synthetic construct
  source 1..19: mol_type = other RNA
agggccggtgggaagacac

SEQ ID NO: 1232 - RNA, 19 nt, synthetic construct
  source 1..19: mol_type = other RNA
gggccggtgggaagacaca

SEQ ID NO: 1233 - RNA, 19 nt, synthetic construct
  source 1..19: mol_type = other RNA
ggccggtgggaagacacaa

SEQ ID NO: 1234 - RNA, 19 nt, synthetic construct
  source 1..19: mol_type = other RNA
gccggtgggaagacacaaa

SEQ ID NO: 1235 - RNA, 19 nt, synthetic construct
  source 1..19: mol_type = other RNA
ccggtgggaagacacaaag

SEQ ID NO: 1236 - RNA, 19 nt, synthetic construct
  source 1..19: mol_type = other RNA
cggtgggaagacacaaagt

SEQ ID NO: 1237 - RNA, 19 nt, synthetic construct
  source 1..19: mol_type = other RNA
gacacaaagtgatgtgggc

SEQ ID NO: 1238 - RNA, 19 nt, synthetic construct
  source 1..19: mol_type = other RNA
acacaaagtgatgtgggca

SEQ ID NO: 1239 - RNA, 19 nt, synthetic construct
  source 1..19: mol_type = other RNA
cacaaagtgatgtgggcaa

SEQ ID NO: 1240 - RNA, 19 nt, synthetic construct
  source 1..19: mol_type = other RNA
aagtgatgtgggcaagtgc

SEQ ID NO: 1241 - RNA, 19 nt, synthetic construct
  source 1..19: mol_type = other RNA
agtgatgtgggcaagtgcc

SEQ ID NO: 1242 - RNA, 19 nt, synthetic construct
  source 1..19: mol_type = other RNA
gtgatgtgggcaagtgcca

SEQ ID NO: 1243 - RNA, 19 nt, synthetic construct
  source 1..19: mol_type = other RNA
tgatgtgggcaagtgccag

SEQ ID NO: 1244 - RNA, 19 nt, synthetic construct
  source 1..19: mol_type = other RNA
gatgtgggcaagtgccagg

SEQ ID NO: 1245 - RNA, 19 nt, synthetic construct
  source 1..19: mol_type = other RNA
tgtgggcaagtgccaggcc

SEQ ID NO: 1246 - RNA, 19 nt, synthetic construct
  source 1..19: mol_type = other RNA
gggcaagtgccaggcccac

SEQ ID NO: 1247 - RNA, 19 nt, synthetic construct
  source 1..19: mol_type = other RNA
gcaagtgccaggcccacat

SEQ ID NO: 1248 - RNA, 19 nt, synthetic construct
  source 1..19: mol_type = other RNA
caagtgccaggcccacatg

SEQ ID NO: 1249 - RNA, 19 nt, synthetic construct
  source 1..19: mol_type = other RNA
caggcccacatggtaagta

SEQ ID NO: 1250 - RNA, 19 nt, synthetic construct
  source 1..19: mol_type = other RNA
ggtaagtacccaactaatc

SEQ ID NO: 1251 - RNA, 19 nt, synthetic construct
  source 1..19: mol_type = other RNA
gtaagtacccaactaatct

SEQ ID NO: 1252 - RNA, 19 nt, synthetic construct
  source 1..19: mol_type = other RNA
taagtacccaactaatctc

SEQ ID NO: 1253 - RNA, 19 nt, synthetic construct
  source 1..19: mol_type = other RNA
aagtacccaactaatctcg

SEQ ID NO: 1254 - RNA, 19 nt, synthetic construct
  source 1..19: mol_type = other RNA
agtacccaactaatctcgc

SEQ ID NO: 1255 - RNA, 19 nt, synthetic construct
  source 1..19: mol_type = other RNA
gtacccaactaatctcgcc

SEQ ID NO: 1256 - RNA, 19 nt, synthetic construct
  source 1..19: mol_type = other RNA
tacccaactaatctcgccc

SEQ ID NO: 1257 - RNA, 19 nt, synthetic construct
  source 1..19: mol_type = other RNA
acccaactaatctcgcccc

SEQ ID NO: 1258 - RNA, 19 nt, synthetic construct
  source 1..19: mol_type = other RNA
cccaactaatctcgcccct

SEQ ID NO: 1259 - RNA, 19 nt, synthetic construct
  source 1..19: mol_type = other RNA
ccaactaatctcgcccctc

SEQ ID NO: 1260 - RNA, 19 nt, synthetic construct
  source 1..19: mol_type = other RNA
caactaatctcgcccctct

SEQ ID NO: 1261 - RNA, 19 nt, synthetic construct
  source 1..19: mol_type = other RNA
aactaatctcgcccctctc

SEQ ID NO: 1262 - RNA, 19 nt, synthetic construct
  source 1..19: mol_type = other RNA
actaatctcgcccctctca

SEQ ID NO: 1263 - RNA, 19 nt, synthetic construct
  source 1..19: mol_type = other RNA
ctaatctcgcccctctcag

SEQ ID NO: 1264 - RNA, 19 nt, synthetic construct
  source 1..19: mol_type = other RNA
taatctcgcccctctcagg

SEQ ID NO: 1265 - RNA, 19 nt, synthetic construct
  source 1..19: mol_type = other RNA
aatctcgcccctctcagga

SEQ ID NO: 1266 - RNA, 19 nt, synthetic construct
  source 1..19: mol_type = other RNA
atctcgcccctctcaggac

SEQ ID NO: 1267 - RNA, 19 nt, synthetic construct
  source 1..19: mol_type = other RNA
tctcgcccctctcaggacc

SEQ ID NO: 1268 - RNA, 19 nt, synthetic construct
  source 1..19: mol_type = other RNA
tcgcccctctcaggaccta

SEQ ID NO: 1269 - RNA, 19 nt, synthetic construct
  source 1..19: mol_type = other RNA
cgcccctctcaggacctac

SEQ ID NO: 1270 - RNA, 20 nt, synthetic construct
  source 1..20: mol_type = other RNA
aaattacctagaaataaggt

SEQ ID NO: 1271 - RNA, 20 nt, synthetic construct
  source 1..20: mol_type = other RNA
aattacctagaaataaggtt

SEQ ID NO: 1272 - RNA, 20 nt, synthetic construct
  source 1..20: mol_type = other RNA
attacctagaaataaggttt

SEQ ID NO: 1273 - RNA, 20 nt, synthetic construct
  source 1..20: mol_type = other RNA
tacctagaaataaggtttct

SEQ ID NO: 1274 - RNA, 20 nt, synthetic construct
  source 1..20: mol_type = other RNA
acctagaaataaggtttctt

SEQ ID NO: 1275 - RNA, 20 nt, synthetic construct
  source 1..20: mol_type = other RNA
cctagaaataaggtttcttt

SEQ ID NO: 1276 - RNA, 20 nt, synthetic construct
  source 1..20: mol_type = other RNA
ctagaaataaggtttcttta

SEQ ID NO: 1277 - RNA, 20 nt, synthetic construct
  source 1..20: mol_type = other RNA
tagaaataaggtttctttaa

SEQ ID NO: 1278 - RNA, 20 nt, synthetic construct
  source 1..20: mol_type = other RNA
aaataaggtttctttaattg

SEQ ID NO: 1279 - RNA, 20 nt, synthetic construct
  source 1..20: mol_type = other RNA
aataaggtttctttaattgc

SEQ ID NO: 1280 - RNA, 20 nt, synthetic construct
  source 1..20: mol_type = other RNA
ataaggtttctttaattgct

SEQ ID NO: 1281 - RNA, 20 nt, synthetic construct
  source 1..20: mol_type = other RNA
taaggtttctttaattgctg

SEQ ID NO: 1282 - RNA, 20 nt, synthetic construct
  source 1..20: mol_type = other RNA
aaggtttctttaattgctgg

SEQ ID NO: 1283 - RNA, 20 nt, synthetic construct
  source 1..20: mol_type = other RNA
ggtttctttaattgctggtt

SEQ ID NO: 1284 - RNA, 20 nt, synthetic construct
  source 1..20: mol_type = other RNA
gtttctttaattgctggtta

SEQ ID NO: 1285 - RNA, 20 nt, synthetic construct
  source 1..20: mol_type = other RNA
tttctttaattgctggttaa

SEQ ID NO: 1286 - RNA, 20 nt, synthetic construct
  source 1..20: mol_type = other RNA
ttctttaattgctggttaaa

SEQ ID NO: 1287 - RNA, 20 nt, synthetic construct
  source 1..20: mol_type = other RNA
tctttaattgctggttaaaa

SEQ ID NO: 1288 - RNA, 20 nt, synthetic construct
  source 1..20: mol_type = other RNA
ttaattgctggttaaaatgc

SEQ ID NO: 1289 - RNA, 20 nt, synthetic construct
  source 1..20: mol_type = other RNA
taattgctggttaaaatgct

SEQ ID NO: 1290 - RNA, 20 nt, synthetic construct
  source 1..20: mol_type = other RNA
aattgctggttaaaatgctc

SEQ ID NO: 1291 - RNA, 20 nt, synthetic construct
  source 1..20: mol_type = other RNA
ttgctggttaaaatgctccc

SEQ ID NO: 1292 - RNA, 20 nt, synthetic construct
  source 1..20: mol_type = other RNA
tgctggttaaaatgctcccg

SEQ ID NO: 1293 - RNA, 20 nt, synthetic construct
  source 1..20: mol_type = other RNA
gctggttaaaatgctcccgt

SEQ ID NO: 1294 - RNA, 20 nt, synthetic construct
  source 1..20: mol_type = other RNA
ctggttaaaatgctcccgtg

SEQ ID NO: 1295 - RNA, 20 nt, synthetic construct
  source 1..20: mol_type = other RNA
tggttaaaatgctcccgtgc

SEQ ID NO: 1296 - RNA, 20 nt, synthetic construct
  source 1..20: mol_type = other RNA
gttaaaatgctcccgtgcag

SEQ ID NO: 1297 - RNA, 20 nt, synthetic construct
  source 1..20: mol_type = other RNA
aaaatgctcccgtgcagaaa

SEQ ID NO: 1298 - RNA, 20 nt, synthetic construct
  source 1..20: mol_type = other RNA
aaatgctcccgtgcagaaaa

SEQ ID NO: 1299 - RNA, 20 nt, synthetic construct
  source 1..20: mol_type = other RNA
atgctcccgtgcagaaaaca

SEQ ID NO: 1300 - RNA, 20 nt, synthetic construct
  source 1..20: mol_type = other RNA
tgctcccgtgcagaaaacag

SEQ ID NO: 1301 - RNA, 20 nt, synthetic construct
  source 1..20: mol_type = other RNA
gctcccgtgcagaaaacagg

SEQ ID NO: 1302 - RNA, 20 nt, synthetic construct
  source 1..20: mol_type = other RNA
ctcccgtgcagaaaacagga

SEQ ID NO: 1303 - RNA, 20 nt, synthetic construct
  source 1..20: mol_type = other RNA
cccgtgcagaaaacaggaaa

SEQ ID NO: 1304 - RNA, 20 nt, synthetic construct
  source 1..20: mol_type = other RNA
ccgtgcagaaaacaggaaag

SEQ ID NO: 1305 - RNA, 20 nt, synthetic construct
  source 1..20: mol_type = other RNA
cgtgcagaaaacaggaaaga

SEQ ID NO: 1306 - RNA, 20 nt, synthetic construct
  source 1..20: mol_type = other RNA
gtgcagaaaacaggaaagaa

SEQ ID NO: 1307 - RNA, 20 nt, synthetic construct
  source 1..20: mol_type = other RNA
aacaggaaagaacctgcctg

SEQ ID NO: 1308 - RNA, 20 nt, synthetic construct
  source 1..20: mol_type = other RNA
acaggaaagaacctgcctgg

SEQ ID NO: 1309 - RNA, 20 nt, synthetic construct
  source 1..20: mol_type = other RNA
caggaaagaacctgcctggt

SEQ ID NO: 1310 - RNA, 20 nt, synthetic construct
  source 1..20: mol_type = other RNA
aggaaagaacctgcctggtt

SEQ ID NO: 1311 - RNA, 20 nt, synthetic construct
  source 1..20: mol_type = other RNA
gaaagaacctgcctggttcc

SEQ ID NO: 1312 - RNA, 20 nt, synthetic construct
  source 1..20: mol_type = other RNA
aaagaacctgcctggttcct

SEQ ID NO: 1313 - RNA, 20 nt, synthetic construct
  source 1..20: mol_type = other RNA
aagaacctgcctggttcctt

SEQ ID NO: 1314 - RNA, 20 nt, synthetic construct
  source 1..20: mol_type = other RNA
agaacctgcctggttcctta

SEQ ID NO: 1315 - RNA, 20 nt, synthetic construct
  source 1..20: mol_type = other RNA
gaacctgcctggttccttag

SEQ ID NO: 1316 - RNA, 20 nt, synthetic construct
  source 1..20: mol_type = other RNA
acctgcctggttccttagca

SEQ ID NO: 1317 - RNA, 20 nt, synthetic construct
  source 1..20: mol_type = other RNA
cctgcctggttccttagcaa

SEQ ID NO: 1318 - RNA, 20 nt, synthetic construct
  source 1..20: mol_type = other RNA
ctgcctggttccttagcaaa

SEQ ID NO: 1319 - RNA, 20 nt, synthetic construct
  source 1..20: mol_type = other RNA
tgcctggttccttagcaaat

SEQ ID NO: 1320 - RNA, 20 nt, synthetic construct
  source 1..20: mol_type = other RNA
gcctggttccttagcaaatc

SEQ ID NO: 1321 - RNA, 20 nt, synthetic construct
  source 1..20: mol_type = other RNA
ctggttccttagcaaatctg

SEQ ID NO: 1322 - RNA, 20 nt, synthetic construct
  source 1..20: mol_type = other RNA
tggttccttagcaaatctga

SEQ ID NO: 1323 - RNA, 20 nt, synthetic construct
  source 1..20: mol_type = other RNA
gttccttagcaaatctgagt

SEQ ID NO: 1324 - RNA, 20 nt, synthetic construct
  source 1..20: mol_type = other RNA
ccttagcaaatctgagttcc

SEQ ID NO: 1325 - RNA, 20 nt, synthetic construct
  source 1..20: mol_type = other RNA
cttagcaaatctgagttcca

SEQ ID NO: 1326 - RNA, 20 nt, synthetic construct
  source 1..20: mol_type = other RNA
ttagcaaatctgagttccag

SEQ ID NO: 1327 - RNA, 20 nt, synthetic construct
  source 1..20: mol_type = other RNA
tagcaaatctgagttccagt

SEQ ID NO: 1328 - RNA, 20 nt, synthetic construct
  source 1..20: mol_type = other RNA
aatctgagttccagtcccag

SEQ ID NO: 1329 - RNA, 20 nt, synthetic construct
  source 1..20: mol_type = other RNA
gttccagtcccaggtccact

SEQ ID NO: 1330 - RNA, 20 nt, synthetic construct
  source 1..20: mol_type = other RNA
ttccagtcccaggtccacta

SEQ ID NO: 1331 - RNA, 20 nt, synthetic construct
  source 1..20: mol_type = other RNA
tccagtcccaggtccactac

SEQ ID NO: 1332 - RNA, 20 nt, synthetic construct
  source 1..20: mol_type = other RNA
ccagtcccaggtccactact

SEQ ID NO: 1333 - RNA, 20 nt, synthetic construct
  source 1..20: mol_type = other RNA
gtcccaggtccactactatt

SEQ ID NO: 1334 - RNA, 20 nt, synthetic construct
  source 1..20: mol_type = other RNA
cccaggtccactactattag

SEQ ID NO: 1335 - RNA, 20 nt, synthetic construct
  source 1..20: mol_type = other RNA
ccaggtccactactattagc

SEQ ID NO: 1336 - RNA, 20 nt, synthetic construct
  source 1..20: mol_type = other RNA
caggtccactactattagct

SEQ ID NO: 1337 - RNA, 20 nt, synthetic construct
  source 1..20: mol_type = other RNA
aggtccactactattagctg

SEQ ID NO: 1338 - RNA, 20 nt, synthetic construct
  source 1..20: mol_type = other RNA
ggtccactactattagctga

SEQ ID NO: 1339 - RNA, 20 nt, synthetic construct
  source 1..20: mol_type = other RNA
tccactactattagctgagt

SEQ ID NO: 1340 - RNA, 20 nt, synthetic construct
  source 1..20: mol_type = other RNA
tactattagctgagtgacgc

SEQ ID NO: 1341 - RNA, 20 nt, synthetic construct
  source 1..20: mol_type = other RNA
actattagctgagtgacgct

SEQ ID NO: 1342 - RNA, 20 nt, synthetic construct
  source 1..20: mol_type = other RNA
ctattagctgagtgacgctt

SEQ ID NO: 1343 - RNA, 20 nt, synthetic construct
  source 1..20: mol_type = other RNA
tattagctgagtgacgcttc

SEQ ID NO: 1344 - RNA, 20 nt, synthetic construct
  source 1..20: mol_type = other RNA
attagctgagtgacgcttcc

SEQ ID NO: 1345 - RNA, 20 nt, synthetic construct
  source 1..20: mol_type = other RNA
tagctgagtgacgcttccag

SEQ ID NO: 1346 - RNA, 20 nt, synthetic construct
  source 1..20: mol_type = other RNA
agctgagtgacgcttccagc

SEQ ID NO: 1347 - RNA, 20 nt, synthetic construct
  source 1..20: mol_type = other RNA
gctgagtgacgcttccagcc

SEQ ID NO: 1348 - RNA, 20 nt, synthetic construct
  source 1..20: mol_type = other RNA
ctgagtgacgcttccagccc

SEQ ID NO: 1349 - RNA, 20 nt, synthetic construct
  source 1..20: mol_type = other RNA
tgagtgacgcttccagcccg

SEQ ID NO: 1350 - RNA, 20 nt, synthetic construct
  source 1..20: mol_type = other RNA
gagtgacgcttccagcccgt

SEQ ID NO: 1351 - RNA, 20 nt, synthetic construct
  source 1..20: mol_type = other RNA
gtgacgcttccagcccgttt

SEQ ID NO: 1352 - RNA, 20 nt, synthetic construct
  source 1..20: mol_type = other RNA
tgacgcttccagcccgtttc

SEQ ID NO: 1353 - RNA, 20 nt, synthetic construct
  source 1..20: mol_type = other RNA
gacgcttccagcccgtttcc

SEQ ID NO: 1354 - RNA, 20 nt, synthetic construct
  source 1..20: mol_type = other RNA
acgcttccagcccgtttccc

SEQ ID NO: 1355 - RNA, 20 nt, synthetic construct
  source 1..20: mol_type = other RNA
cgcttccagcccgtttcccc

SEQ ID NO: 1356 - RNA, 20 nt, synthetic construct
  source 1..20: mol_type = other RNA
gcttccagcccgtttccccc

SEQ ID NO: 1357 - RNA, 20 nt, synthetic construct
  source 1..20: mol_type = other RNA
cttccagcccgtttcccccg

SEQ ID NO: 1358 - RNA, 20 nt, synthetic construct
  source 1..20: mol_type = other RNA
tccagcccgtttcccccgcc

SEQ ID NO: 1359 - RNA, 20 nt, synthetic construct
  source 1..20: mol_type = other RNA
ccagcccgtttcccccgcct

SEQ ID NO: 1360 - RNA, 20 nt, synthetic construct
  source 1..20: mol_type = other RNA
cagcccgtttcccccgcctg

SEQ ID NO: 1361 - RNA, 20 nt, synthetic construct
  source 1..20: mol_type = other RNA
agcccgtttcccccgcctgg

SEQ ID NO: 1362 - RNA, 20 nt, synthetic construct
  source 1..20: mol_type = other RNA
cccgtttcccccgcctggaa

SEQ ID NO: 1363 - RNA, 20 nt, synthetic construct
  source 1..20: mol_type = other RNA
ccgtttcccccgcctggaaa

SEQ ID NO: 1364 - RNA, 20 nt, synthetic construct
  source 1..20: mol_type = other RNA
cgtttcccccgcctggaaac

SEQ ID NO: 1365 - RNA, 20 nt, synthetic construct
  source 1..20: mol_type = other RNA
gtttcccccgcctggaaact

SEQ ID NO: 1366 - RNA, 20 nt, synthetic construct
  source 1..20: mol_type = other RNA
tttcccccgcctggaaactg

SEQ ID NO: 1367 - RNA, 20 nt, synthetic construct
  source 1..20: mol_type = other RNA
tcccccgcctggaaactgag

SEQ ID NO: 1368 - RNA, 20 nt, synthetic construct
  source 1..20: mol_type = other RNA
cccccgcctggaaactgagg

SEQ ID NO: 1369 - RNA, 20 nt, synthetic construct
  source 1..20: mol_type = other RNA
cccgcctggaaactgaggac

SEQ ID NO: 1370 - RNA, 20 nt, synthetic construct
  source 1..20: mol_type = other RNA
ccgcctggaaactgaggacg

SEQ ID NO: 1371 - RNA, 20 nt, synthetic construct
  source 1..20: mol_type = other RNA
gcctggaaactgaggacggc

SEQ ID NO: 1372 - RNA, 20 nt, synthetic construct
  source 1..20: mol_type = other RNA
cctggaaactgaggacggca

SEQ ID NO: 1373 - RNA, 20 nt, synthetic construct
  source 1..20: mol_type = other RNA
ctggaaactgaggacggcaa

SEQ ID NO: 1374 - RNA, 20 nt, synthetic construct
  source 1..20: mol_type = other RNA
tggaaactgaggacggcaac

SEQ ID NO: 1375 - RNA, 20 nt, synthetic construct
  source 1..20: mol_type = other RNA
aactgaggacggcaaccccc

SEQ ID NO: 1376 - RNA, 20 nt, synthetic construct
  source 1..20: mol_type = other RNA
actgaggacggcaaccccca

SEQ ID NO: 1377 - RNA, 20 nt, synthetic construct
  source 1..20: mol_type = other RNA
ctgaggacggcaacccccac

SEQ ID NO: 1378 - RNA, 20 nt, synthetic construct
  source 1..20: mol_type = other RNA
gaggacggcaacccccaccc

SEQ ID NO: 1379 - RNA, 20 nt, synthetic construct
  source 1..20: mol_type = other RNA
aggacggcaacccccaccct

SEQ ID NO: 1380 - RNA, 20 nt, synthetic construct
  source 1..20: mol_type = other RNA
ggacggcaacccccaccctc

SEQ ID NO: 1381 - RNA, 20 nt, synthetic construct
  source 1..20: mol_type = other RNA
cggcaacccccaccctcgca

SEQ ID NO: 1382 - RNA, 20 nt, synthetic construct
  source 1..20: mol_type = other RNA
caacccccaccctcgcaggg

SEQ ID NO: 1383 - RNA, 20 nt, synthetic construct
  source 1..20: mol_type = other RNA
aacccccaccctcgcagggc

SEQ ID NO: 1384 - RNA, 20 nt, synthetic construct
  source 1..20: mol_type = other RNA
acccccaccctcgcagggcc

SEQ ID NO: 1385 - RNA, 20 nt, synthetic construct
  source 1..20: mol_type = other RNA
cccaccctcgcagggccggt

SEQ ID NO: 1386 - RNA, 20 nt, synthetic construct
  source 1..20: mol_type = other RNA
ccaccctcgcagggccggtg

SEQ ID NO: 1387 - RNA, 20 nt, synthetic construct
  source 1..20: mol_type = other RNA
caccctcgcagggccggtgg

SEQ ID NO: 1388 - RNA, 20 nt, synthetic construct
  source 1..20: mol_type = other RNA
ccctcgcagggccggtggga

SEQ ID NO: 1389 - RNA, 20 nt, synthetic construct
  source 1..20: mol_type = other RNA
cctcgcagggccggtgggaa

SEQ ID NO: 1390 - RNA, 20 nt, synthetic construct
  source 1..20: mol_type = other RNA
ctcgcagggccggtgggaag

SEQ ID NO: 1391 - RNA, 20 nt, synthetic construct
  source 1..20: mol_type = other RNA
tcgcagggccggtgggaaga

SEQ ID NO: 1392 - RNA, 20 nt, synthetic construct
  source 1..20: mol_type = other RNA
gcagggccggtgggaagaca

SEQ ID NO: 1393 - RNA, 20 nt, synthetic construct
  source 1..20: mol_type = other RNA
cagggccggtgggaagacac

SEQ ID NO: 1394 - RNA, 20 nt, synthetic construct
  source 1..20: mol_type = other RNA
agggccggtgggaagacaca

SEQ ID NO: 1395 - RNA, 20 nt, synthetic construct
  source 1..20: mol_type = other RNA
gggccggtgggaagacacaa

SEQ ID NO: 1396 - RNA, 20 nt, synthetic construct
  source 1..20: mol_type = other RNA
ggccggtgggaagacacaaa

SEQ ID NO: 1397 - RNA, 20 nt, synthetic construct
  source 1..20: mol_type = other RNA
gccggtgggaagacacaaag

SEQ ID NO: 1398 - RNA, 20 nt, synthetic construct
  source 1..20: mol_type = other RNA
cggtgggaagacacaaagtg

SEQ ID NO: 1399 - RNA, 20 nt, synthetic construct
  source 1..20: mol_type = other RNA
tgggaagacacaaagtgatg

SEQ ID NO: 1400 - RNA, 20 nt, synthetic construct
  source 1..20: mol_type = other RNA
aagacacaaagtgatgtggg

SEQ ID NO: 1401 - RNA, 20 nt, synthetic construct
  source 1..20: mol_type = other RNA
agacacaaagtgatgtgggc

SEQ ID NO: 1402 - RNA, 20 nt, synthetic construct
  source 1..20: mol_type = other RNA
acacaaagtgatgtgggcaa

SEQ ID NO: 1403 - RNA, 20 nt, synthetic construct
  source 1..20: mol_type = other RNA
cacaaagtgatgtgggcaag

SEQ ID NO: 1404 - RNA, 20 nt, synthetic construct
  source 1..20: mol_type = other RNA
caaagtgatgtgggcaagtg

SEQ ID NO: 1405 - RNA, 20 nt, synthetic construct
  source 1..20: mol_type = other RNA
aagtgatgtgggcaagtgcc

SEQ ID NO: 1406 - RNA, 20 nt, synthetic construct
  source 1..20: mol_type = other RNA
agtgatgtgggcaagtgcca

SEQ ID NO: 1407 - RNA, 20 nt, synthetic construct
  source 1..20: mol_type = other RNA
gtgatgtgggcaagtgccag

SEQ ID NO: 1408 - RNA, 20 nt, synthetic construct
  source 1..20: mol_type = other RNA
tgatgtgggcaagtgccagg

SEQ ID NO: 1409 - RNA, 20 nt, synthetic construct
  source 1..20: mol_type = other RNA
atgtgggcaagtgccaggcc

SEQ ID NO: 1410 - RNA, 20 nt, synthetic construct
  source 1..20: mol_type = other RNA
tgtgggcaagtgccaggccc

SEQ ID NO: 1411 - RNA, 20 nt, synthetic construct
  source 1..20: mol_type = other RNA
gtgggcaagtgccaggccca

SEQ ID NO: 1412 - RNA, 20 nt, synthetic construct
  source 1..20: mol_type = other RNA
tgggcaagtgccaggcccac

SEQ ID NO: 1413 - RNA, 20 nt, synthetic construct
  source 1..20: mol_type = other RNA
gggcaagtgccaggcccaca

SEQ ID NO: 1414 - RNA, 20 nt, synthetic construct
  source 1..20: mol_type = other RNA
ggcaagtgccaggcccacat

SEQ ID NO: 1415 - RNA, 20 nt, synthetic construct
  source 1..20: mol_type = other RNA
gcaagtgccaggcccacatg

SEQ ID NO: 1416 - RNA, 20 nt, synthetic construct
  source 1..20: mol_type = other RNA
caagtgccaggcccacatgg

SEQ ID NO: 1417 - RNA, 20 nt, synthetic construct
  source 1..20: mol_type = other RNA
agtgccaggcccacatggta

SEQ ID NO: 1418 - RNA, 20 nt, synthetic construct
  source 1..20: mol_type = other RNA
gtgccaggcccacatggtaa

SEQ ID NO: 1419 - RNA, 20 nt, synthetic construct
  source 1..20: mol_type = other RNA
ccaggcccacatggtaagta

SEQ ID NO: 1420 - RNA, 20 nt, synthetic construct
  source 1..20: mol_type = other RNA
caggcccacatggtaagtac

SEQ ID NO: 1421 - RNA, 20 nt, synthetic construct
  source 1..20: mol_type = other RNA
aggcccacatggtaagtacc

SEQ ID NO: 1422 - RNA, 20 nt, synthetic construct
  source 1..20: mol_type = other RNA
cccacatggtaagtacccaa

SEQ ID NO: 1423 - RNA, 20 nt, synthetic construct
  source 1..20: mol_type = other RNA
ggtaagtacccaactaatct

SEQ ID NO: 1424 - RNA, 20 nt, synthetic construct
  source 1..20: mol_type = other RNA
gtaagtacccaactaatctc

SEQ ID NO: 1425 - RNA, 20 nt, synthetic construct
  source 1..20: mol_type = other RNA
taagtacccaactaatctcg

SEQ ID NO: 1426 - RNA, 20 nt, synthetic construct
  source 1..20: mol_type = other RNA
aagtacccaactaatctcgc

SEQ ID NO: 1427 - RNA, 20 nt, synthetic construct
  source 1..20: mol_type = other RNA
gtacccaactaatctcgccc

SEQ ID NO: 1428 - RNA, 20 nt, synthetic construct
  source 1..20: mol_type = other RNA
tacccaactaatctcgcccc

SEQ ID NO: 1429 - RNA, 20 nt, synthetic construct
  source 1..20: mol_type = other RNA
acccaactaatctcgcccct

SEQ ID NO: 1430 - RNA, 20 nt, synthetic construct
  source 1..20: mol_type = other RNA
cccaactaatctcgcccctc

SEQ ID NO: 1431 - RNA, 20 nt, synthetic construct
  source 1..20: mol_type = other RNA
ccaactaatctcgcccctct

SEQ ID NO: 1432 - RNA, 20 nt, synthetic construct
  source 1..20: mol_type = other RNA
caactaatctcgcccctctc

SEQ ID NO: 1433 - RNA, 20 nt, synthetic construct
  source 1..20: mol_type = other RNA
aactaatctcgcccctctca

SEQ ID NO: 1434 - RNA, 20 nt, synthetic construct
  source 1..20: mol_type = other RNA
actaatctcgcccctctcag

SEQ ID NO: 1435 - RNA, 20 nt, synthetic construct
  source 1..20: mol_type = other RNA
taatctcgcccctctcagga

SEQ ID NO: 1436 - RNA, 20 nt, synthetic construct
  source 1..20: mol_type = other RNA
aatctcgcccctctcaggac

SEQ ID NO: 1437 - RNA, 20 nt, synthetic construct
  source 1..20: mol_type = other RNA
atctcgcccctctcaggacc

SEQ ID NO: 1438 - RNA, 20 nt, synthetic construct
  source 1..20: mol_type = other RNA
tctcgcccctctcaggacct

SEQ ID NO: 1439 - RNA, 20 nt, synthetic construct
  source 1..20: mol_type = other RNA
ctcgcccctctcaggaccta

SEQ ID NO: 1440 - RNA, 20 nt, synthetic construct
  source 1..20: mol_type = other RNA
tcgcccctctcaggacctac

SEQ ID NO: 1441 - RNA, 21 nt, synthetic construct
  source 1..21: mol_type = other RNA
tcttttaaaaattacctagaa

SEQ ID NO: 1442 - RNA, 21 nt, synthetic construct
  source 1..21: mol_type = other RNA
aaaattacctagaaataaggt

SEQ ID NO: 1443 - RNA, 21 nt, synthetic construct
  source 1..21: mol_type = other RNA
aaattacctagaaataaggtt

SEQ ID NO: 1444 - RNA, 21 nt, synthetic construct
  source 1..21: mol_type = other RNA
aattacctagaaataaggttt

SEQ ID NO: 1445 - RNA, 21 nt, synthetic construct
  source 1..21: mol_type = other RNA
attacctagaaataaggtttc

SEQ ID NO: 1446 - RNA, 21 nt, synthetic construct
  source 1..21: mol_type = other RNA
ttacctagaaataaggtttct

SEQ ID NO: 1447 - RNA, 21 nt, synthetic construct
  source 1..21: mol_type = other RNA
tacctagaaataaggtttctt

SEQ ID NO: 1448 - RNA, 21 nt, synthetic construct
  source 1..21: mol_type = other RNA
acctagaaataaggtttcttt

SEQ ID NO: 1449 - RNA, 21 nt, synthetic construct
  source 1..21: mol_type = other RNA
cctagaaataaggtttcttta

SEQ ID NO: 1450 - RNA, 21 nt, synthetic construct
  source 1..21: mol_type = other RNA
ctagaaataaggtttctttaa

SEQ ID NO: 1451 - RNA, 21 nt, synthetic construct
  source 1..21: mol_type = other RNA
tagaaataaggtttctttaat

SEQ ID NO: 1452 - RNA, 21 nt, synthetic construct
  source 1..21: mol_type = other RNA
agaaataaggtttctttaatt

SEQ ID NO: 1453 - RNA, 21 nt, synthetic construct
  source 1..21: mol_type = other RNA
gaaataaggtttctttaattg

SEQ ID NO: 1454 - RNA, 21 nt, synthetic construct
  source 1..21: mol_type = other RNA
aaataaggtttctttaattgc

SEQ ID NO: 1455 - RNA, 21 nt, synthetic construct
  source 1..21: mol_type = other RNA
aataaggtttctttaattgct

SEQ ID NO: 1456 - RNA, 21 nt, synthetic construct
  source 1..21: mol_type = other RNA
ataaggtttctttaattgctg

SEQ ID NO: 1457 - RNA, 21 nt, synthetic construct
  source 1..21: mol_type = other RNA
taaggtttctttaattgctgg

SEQ ID NO: 1458 - RNA, 21 nt, synthetic construct
  source 1..21: mol_type = other RNA
aaggtttctttaattgctggt

SEQ ID NO: 1459 - RNA, 21 nt, synthetic construct
  source 1..21: mol_type = other RNA
aggtttctttaattgctggtt

SEQ ID NO: 1460 - RNA, 21 nt, synthetic construct
  source 1..21: mol_type = other RNA
ggtttctttaattgctggtta

SEQ ID NO: 1461 - RNA, 21 nt, synthetic construct
  source 1..21: mol_type = other RNA
gtttctttaattgctggttaa

SEQ ID NO: 1462 - RNA, 21 nt, synthetic construct
  source 1..21: mol_type = other RNA
tttctttaattgctggttaaa

SEQ ID NO: 1463 - RNA, 21 nt, synthetic construct
  source 1..21: mol_type = other RNA
ttctttaattgctggttaaaa

SEQ ID NO: 1464 - RNA, 21 nt, synthetic construct
  source 1..21: mol_type = other RNA
tctttaattgctggttaaaat

SEQ ID NO: 1465 - RNA, 21 nt, synthetic construct
  source 1..21: mol_type = other RNA
ctttaattgctggttaaaatg

SEQ ID NO: 1466 - RNA, 21 nt, synthetic construct
  source 1..21: mol_type = other RNA
tttaattgctggttaaaatgc

SEQ ID NO: 1467 - RNA, 21 nt, synthetic construct
  source 1..21: mol_type = other RNA
ttaattgctggttaaaatgct

SEQ ID NO: 1468 - RNA, 21 nt, synthetic construct
  source 1..21: mol_type = other RNA
taattgctggttaaaatgctc

SEQ ID NO: 1469 - RNA, 21 nt, synthetic construct
  source 1..21: mol_type = other RNA
aattgctggttaaaatgctcc

SEQ ID NO: 1470 - RNA, 21 nt, synthetic construct
  source 1..21: mol_type = other RNA
attgctggttaaaatgctccc

SEQ ID NO: 1471 - RNA, 21 nt, synthetic construct
  source 1..21: mol_type = other RNA
ttgctggttaaaatgctcccg

SEQ ID NO: 1472 - RNA, 21 nt, synthetic construct
  source 1..21: mol_type = other RNA
tgctggttaaaatgctcccgt

SEQ ID NO: 1473 - RNA, 21 nt, synthetic construct
  source 1..21: mol_type = other RNA
gctggttaaaatgctcccgtg

SEQ ID NO: 1474 - RNA, 21 nt, synthetic construct
  source 1..21: mol_type = other RNA
ctggttaaaatgctcccgtgc

SEQ ID NO: 1475 - RNA, 21 nt, synthetic construct
  source 1..21: mol_type = other RNA
tggttaaaatgctcccgtgca

SEQ ID NO: 1476 - RNA, 21 nt, synthetic construct
  source 1..21: mol_type = other RNA
ggttaaaatgctcccgtgcag

SEQ ID NO: 1477 - RNA, 21 nt, synthetic construct
  source 1..21: mol_type = other RNA
gttaaaatgctcccgtgcaga

SEQ ID NO: 1478 - RNA, 21 nt, synthetic construct
  source 1..21: mol_type = other RNA
taaaatgctcccgtgcagaaa

SEQ ID NO: 1479 - RNA, 21 nt, synthetic construct
  source 1..21: mol_type = other RNA
aaaatgctcccgtgcagaaaa

SEQ ID NO: 1480 - RNA, 21 nt, synthetic construct
  source 1..21: mol_type = other RNA
aaatgctcccgtgcagaaaac

SEQ ID NO: 1481 - RNA, 21 nt, synthetic construct
  source 1..21: mol_type = other RNA
aatgctcccgtgcagaaaaca

SEQ ID NO: 1482 - RNA, 21 nt, synthetic construct
  source 1..21: mol_type = other RNA
atgctcccgtgcagaaaacag

SEQ ID NO: 1483 - RNA, 21 nt, synthetic construct
  source 1..21: mol_type = other RNA
tgctcccgtgcagaaaacagg

SEQ ID NO: 1484 - RNA, 21 nt, synthetic construct
  source 1..21: mol_type = other RNA
gctcccgtgcagaaaacagga

SEQ ID NO: 1485 - RNA, 21 nt, synthetic construct
  source 1..21: mol_type = other RNA
ctcccgtgcagaaaacaggaa

SEQ ID NO: 1486 - RNA, 21 nt, synthetic construct
  source 1..21: mol_type = other RNA
tcccgtgcagaaaacaggaaa

SEQ ID NO: 1487 - RNA, 21 nt, synthetic construct
  source 1..21: mol_type = other RNA
cccgtgcagaaaacaggaaag

SEQ ID NO: 1488 - RNA, 21 nt, synthetic construct
  source 1..21: mol_type = other RNA
ccgtgcagaaaacaggaaaga

SEQ ID NO: 1489 - RNA, 21 nt, synthetic construct
  source 1..21: mol_type = other RNA
cgtgcagaaaacaggaaagaa

SEQ ID NO: 1490 - RNA, 21 nt, synthetic construct
  source 1..21: mol_type = other RNA
gtgcagaaaacaggaaagaac

SEQ ID NO: 1491 - RNA, 21 nt, synthetic construct
  source 1..21: mol_type = other RNA
agaaaacaggaaagaacctgc

SEQ ID NO: 1492 - RNA, 21 nt, synthetic construct
  source 1..21: mol_type = other RNA
aaacaggaaagaacctgcctg

SEQ ID NO: 1493 - RNA, 21 nt, synthetic construct
  source 1..21: mol_type = other RNA
aacaggaaagaacctgcctgg

SEQ ID NO: 1494 - RNA, 21 nt, synthetic construct
  source 1..21: mol_type = other RNA
acaggaaagaacctgcctggt

SEQ ID NO: 1495 - RNA, 21 nt, synthetic construct
  source 1..21: mol_type = other RNA
caggaaagaacctgcctggtt

SEQ ID NO: 1496 - RNA, 21 nt, synthetic construct
  source 1..21: mol_type = other RNA
aggaaagaacctgcctggttc

SEQ ID NO: 1497 - RNA, 21 nt, synthetic construct
  source 1..21: mol_type = other RNA
ggaaagaacctgcctggttcc

SEQ ID NO: 1498 - RNA, 21 nt, synthetic construct
  source 1..21: mol_type = other RNA
gaaagaacctgcctggttcct

SEQ ID NO: 1499 - RNA, 21 nt, synthetic construct
  source 1..21: mol_type = other RNA
aaagaacctgcctggttcctt

SEQ ID NO: 1500 - RNA, 21 nt, synthetic construct
  source 1..21: mol_type = other RNA
aagaacctgcctggttcctta

SEQ ID NO: 1501 - RNA, 21 nt, synthetic construct
  source 1..21: mol_type = other RNA
agaacctgcctggttccttag

SEQ ID NO: 1502 - RNA, 21 nt, synthetic construct
  source 1..21: mol_type = other RNA
gaacctgcctggttccttagc

SEQ ID NO: 1503 - RNA, 21 nt, synthetic construct
  source 1..21: mol_type = other RNA
aacctgcctggttccttagca

SEQ ID NO: 1504 - RNA, 21 nt, synthetic construct
  source 1..21: mol_type = other RNA
acctgcctggttccttagcaa

SEQ ID NO: 1505 - RNA, 21 nt, synthetic construct
  source 1..21: mol_type = other RNA
cctgcctggttccttagcaaa

SEQ ID NO: 1506 - RNA, 21 nt, synthetic construct
  source 1..21: mol_type = other RNA
ctgcctggttccttagcaaat

SEQ ID NO: 1507 - RNA, 21 nt, synthetic construct
  source 1..21: mol_type = other RNA
tgcctggttccttagcaaatc

SEQ ID NO: 1508 - RNA, 21 nt, synthetic construct
  source 1..21: mol_type = other RNA
gcctggttccttagcaaatct

SEQ ID NO: 1509 - RNA, 21 nt, synthetic construct
  source 1..21: mol_type = other RNA
cctggttccttagcaaatctg

SEQ ID NO: 1510 - RNA, 21 nt, synthetic construct
  source 1..21: mol_type = other RNA
ctggttccttagcaaatctga

SEQ ID NO: 1511 - RNA, 21 nt, synthetic construct
  source 1..21: mol_type = other RNA
tggttccttagcaaatctgag

SEQ ID NO: 1512 - RNA, 21 nt, synthetic construct
  source 1..21: mol_type = other RNA
ggttccttagcaaatctgagt

SEQ ID NO: 1513 - RNA, 21 nt, synthetic construct
  source 1..21: mol_type = other RNA
gttccttagcaaatctgagtt

SEQ ID NO: 1514 - RNA, 21 nt, synthetic construct
  source 1..21: mol_type = other RNA
ttccttagcaaatctgagttc

SEQ ID NO: 1515 - RNA, 21 nt, synthetic construct
  source 1..21: mol_type = other RNA
tccttagcaaatctgagttcc

SEQ ID NO: 1516 - RNA, 21 nt, synthetic construct
  source 1..21: mol_type = other RNA
ccttagcaaatctgagttcca

SEQ ID NO: 1517 - RNA, 21 nt, synthetic construct
  source 1..21: mol_type = other RNA
cttagcaaatctgagttccag

SEQ ID NO: 1518 - RNA, 21 nt, synthetic construct
  source 1..21: mol_type = other RNA
ttagcaaatctgagttccagt

SEQ ID NO: 1519 - RNA, 21 nt, synthetic construct
  source 1..21: mol_type = other RNA
tagcaaatctgagttccagtc

SEQ ID NO: 1520 - RNA, 21 nt, synthetic construct
  source 1..21: mol_type = other RNA
agcaaatctgagttccagtcc

SEQ ID NO: 1521 - RNA, 21 nt, synthetic construct
  source 1..21: mol_type = other RNA
gcaaatctgagttccagtccc

SEQ ID NO: 1522 - RNA, 21 nt, synthetic construct
  source 1..21: mol_type = other RNA
aaatctgagttccagtcccag

SEQ ID NO: 1523 - RNA, 21 nt, synthetic construct
  source 1..21: mol_type = other RNA
aatctgagttccagtcccagg

SEQ ID NO: 1524 - RNA, 21 nt, synthetic construct
  source 1..21: mol_type = other RNA
agttccagtcccaggtccact

SEQ ID NO: 1525 - RNA, 21 nt, synthetic construct
  source 1..21: mol_type = other RNA
gttccagtcccaggtccacta

SEQ ID NO: 1526 - RNA, 21 nt, synthetic construct
  source 1..21: mol_type = other RNA
ttccagtcccaggtccactac

SEQ ID NO: 1527 - RNA, 21 nt, synthetic construct
  source 1..21: mol_type = other RNA
tccagtcccaggtccactact

SEQ ID NO: 1528 - RNA, 21 nt, synthetic construct
  source 1..21: mol_type = other RNA
ccagtcccaggtccactacta

SEQ ID NO: 1529 - RNA, 21 nt, synthetic construct
  source 1..21: mol_type = other RNA
cagtcccaggtccactactat

SEQ ID NO: 1530 - RNA, 21 nt, synthetic construct
  source 1..21: mol_type = other RNA
agtcccaggtccactactatt

SEQ ID NO: 1531 - RNA, 21 nt, synthetic construct
  source 1..21: mol_type = other RNA
gtcccaggtccactactatta

SEQ ID NO: 1532 - RNA, 21 nt, synthetic construct
  source 1..21: mol_type = other RNA
tcccaggtccactactattag

SEQ ID NO: 1533 - RNA, 21 nt, synthetic construct
  source 1..21: mol_type = other RNA
cccaggtccactactattagc

SEQ ID NO: 1534 - RNA, 21 nt, synthetic construct
  source 1..21: mol_type = other RNA
ccaggtccactactattagct

SEQ ID NO: 1535 - RNA, 21 nt, synthetic construct
  source 1..21: mol_type = other RNA
caggtccactactattagctg

SEQ ID NO: 1536 - RNA, 21 nt, synthetic construct
  source 1..21: mol_type = other RNA
aggtccactactattagctga

SEQ ID NO: 1537 - RNA, 21 nt, synthetic construct
  source 1..21: mol_type = other RNA
ggtccactactattagctgag

SEQ ID NO: 1538 - RNA, 21 nt, synthetic construct
  source 1..21: mol_type = other RNA
gtccactactattagctgagt

SEQ ID NO: 1539 - RNA, 21 nt, synthetic construct
  source 1..21: mol_type = other RNA
tccactactattagctgagtg

SEQ ID NO: 1540 - RNA, 21 nt, synthetic construct
  source 1..21: mol_type = other RNA
actactattagctgagtgacg

SEQ ID NO: 1541 - RNA, 21 nt, synthetic construct
  source 1..21: mol_type = other RNA
ctactattagctgagtgacgc

SEQ ID NO: 1542 - RNA, 21 nt, synthetic construct
  source 1..21: mol_type = other RNA
tactattagctgagtgacgct

SEQ ID NO: 1543 - RNA, 21 nt, synthetic construct
  source 1..21: mol_type = other RNA
actattagctgagtgacgctt

SEQ ID NO: 1544 - RNA, 21 nt, synthetic construct
  source 1..21: mol_type = other RNA
ctattagctgagtgacgcttc

SEQ ID NO: 1545 - RNA, 21 nt, synthetic construct
  source 1..21: mol_type = other RNA
tattagctgagtgacgcttcc

SEQ ID NO: 1546 - RNA, 21 nt, synthetic construct
  source 1..21: mol_type = other RNA
attagctgagtgacgcttcca

SEQ ID NO: 1547 - RNA, 21 nt, synthetic construct
  source 1..21: mol_type = other RNA
ttagctgagtgacgcttccag

SEQ ID NO: 1548 - RNA, 21 nt, synthetic construct
  source 1..21: mol_type = other RNA
tagctgagtgacgcttccagc

SEQ ID NO: 1549 - RNA, 21 nt, synthetic construct
  source 1..21: mol_type = other RNA
agctgagtgacgcttccagcc

SEQ ID NO: 1550 - RNA, 21 nt, synthetic construct
  source 1..21: mol_type = other RNA
gctgagtgacgcttccagccc

SEQ ID NO: 1551 - RNA, 21 nt, synthetic construct
  source 1..21: mol_type = other RNA
ctgagtgacgcttccagcccg

SEQ ID NO: 1552 - RNA, 21 nt, synthetic construct
  source 1..21: mol_type = other RNA
tgagtgacgcttccagcccgt

SEQ ID NO: 1553 - RNA, 21 nt, synthetic construct
  source 1..21: mol_type = other RNA
gagtgacgcttccagcccgtt

SEQ ID NO: 1554 - RNA, 21 nt, synthetic construct
  source 1..21: mol_type = other RNA
agtgacgcttccagcccgttt

SEQ ID NO: 1555 - RNA, 21 nt, synthetic construct
  source 1..21: mol_type = other RNA
gtgacgcttccagcccgtttc

SEQ ID NO: 1556 - RNA, 21 nt, synthetic construct
  source 1..21: mol_type = other RNA
tgacgcttccagcccgtttcc

SEQ ID NO: 1557 - RNA, 21 nt, synthetic construct
  source 1..21: mol_type = other RNA
gacgcttccagcccgtttccc

SEQ ID NO: 1558 - RNA, 21 nt, synthetic construct
  source 1..21: mol_type = other RNA
acgcttccagcccgtttcccc

SEQ ID NO: 1559 - RNA, 21 nt, synthetic construct
  source 1..21: mol_type = other RNA
cgcttccagcccgtttccccc

SEQ ID NO: 1560 - RNA, 21 nt, synthetic construct
  source 1..21: mol_type = other RNA
gcttccagcccgtttcccccg

SEQ ID NO: 1561 - RNA, 21 nt, synthetic construct
  source 1..21: mol_type = other RNA
cttccagcccgtttcccccgc

SEQ ID NO: 1562 - RNA, 21 nt, synthetic construct
  source 1..21: mol_type = other RNA
ttccagcccgtttcccccgcc

SEQ ID NO: 1563 - RNA, 21 nt, synthetic construct
  source 1..21: mol_type = other RNA
tccagcccgtttcccccgcct

SEQ ID NO: 1564 - RNA, 21 nt, synthetic construct
  source 1..21: mol_type = other RNA
ccagcccgtttcccccgcctg

SEQ ID NO: 1565 - RNA, 21 nt, synthetic construct
  source 1..21: mol_type = other RNA
cagcccgtttcccccgcctgg

SEQ ID NO: 1566 - RNA, 21 nt, synthetic construct
  source 1..21: mol_type = other RNA
agcccgtttcccccgcctgga

SEQ ID NO: 1567 - RNA, 21 nt, synthetic construct
  source 1..21: mol_type = other RNA
gcccgtttcccccgcctggaa

SEQ ID NO: 1568 - RNA, 21 nt, synthetic construct
  source 1..21: mol_type = other RNA
cccgtttcccccgcctggaaa

SEQ ID NO: 1569 - RNA, 21 nt, synthetic construct
  source 1..21: mol_type = other RNA
ccgtttcccccgcctggaaac

SEQ ID NO: 1570 - RNA, 21 nt, synthetic construct
  source 1..21: mol_type = other RNA
cgtttcccccgcctggaaact

SEQ ID NO: 1571 - RNA, 21 nt, synthetic construct
  source 1..21: mol_type = other RNA
gtttcccccgcctggaaactg

SEQ ID NO: 1572 - RNA, 21 nt, synthetic construct
  source 1..21: mol_type = other RNA
tttcccccgcctggaaactga

SEQ ID NO: 1573 - RNA, 21 nt, synthetic construct
  source 1..21: mol_type = other RNA
ttcccccgcctggaaactgag

SEQ ID NO: 1574 - RNA, 21 nt, synthetic construct
  source 1..21: mol_type = other RNA
tcccccgcctggaaactgagg

SEQ ID NO: 1575 - RNA, 21 nt, synthetic construct
  source 1..21: mol_type = other RNA
cccccgcctggaaactgagga

SEQ ID NO: 1576 - RNA, 21 nt, synthetic construct
  source 1..21: mol_type = other RNA
ccccgcctggaaactgaggac

SEQ ID NO: 1577 - RNA, 21 nt, synthetic construct
  source 1..21: mol_type = other RNA
cccgcctggaaactgaggacg

SEQ ID NO: 1578 - RNA, 21 nt, synthetic construct
  source 1..21: mol_type = other RNA
ccgcctggaaactgaggacgg

SEQ ID NO: 1579 - RNA, 21 nt, synthetic construct
  source 1..21: mol_type = other RNA
cgcctggaaactgaggacggc

SEQ ID NO: 1580 - RNA, 21 nt, synthetic construct
  source 1..21: mol_type = other RNA
gcctggaaactgaggacggca

SEQ ID NO: 1581 - RNA, 21 nt, synthetic construct
  source 1..21: mol_type = other RNA
cctggaaactgaggacggcaa

SEQ ID NO: 1582 - RNA, 21 nt, synthetic construct
  source 1..21: mol_type = other RNA
ctggaaactgaggacggcaac

SEQ ID NO: 1583 - RNA, 21 nt, synthetic construct
  source 1..21: mol_type = other RNA
tggaaactgaggacggcaacc

SEQ ID NO: 1584 - RNA, 21 nt, synthetic construct
  source 1..21: mol_type = other RNA
ggaaactgaggacggcaaccc

SEQ ID NO: 1585 - RNA, 21 nt, synthetic construct
  source 1..21: mol_type = other RNA
aaactgaggacggcaaccccc

SEQ ID NO: 1586 - RNA, 21 nt, synthetic construct
  source 1..21: mol_type = other RNA
aactgaggacggcaaccccca

SEQ ID NO: 1587 - RNA, 21 nt, synthetic construct
  source 1..21: mol_type = other RNA
actgaggacggcaacccccac

SEQ ID NO: 1588 - RNA, 21 nt, synthetic construct
  source 1..21: mol_type = other RNA
ctgaggacggcaacccccacc

SEQ ID NO: 1589 - RNA, 21 nt, synthetic construct
  source 1..21: mol_type = other RNA
tgaggacggcaacccccaccc

SEQ ID NO: 1590 - RNA, 21 nt, synthetic construct
  source 1..21: mol_type = other RNA
gaggacggcaacccccaccct

SEQ ID NO: 1591 - RNA, 21 nt, synthetic construct
  source 1..21: mol_type = other RNA
aggacggcaacccccaccctc

SEQ ID NO: 1592 - RNA, 21 nt, synthetic construct
  source 1..21: mol_type = other RNA
ggacggcaacccccaccctcg

SEQ ID NO: 1593 - RNA, 21 nt, synthetic construct
  source 1..21: mol_type = other RNA
acggcaacccccaccctcgca

SEQ ID NO: 1594 - RNA, 21 nt, synthetic construct
  source 1..21: mol_type = other RNA
cggcaacccccaccctcgcag

SEQ ID NO: 1595 - RNA, 21 nt, synthetic construct
  source 1..21: mol_type = other RNA
ggcaacccccaccctcgcagg

SEQ ID NO: 1596 - RNA, 21 nt, synthetic construct
  source 1..21: mol_type = other RNA
gcaacccccaccctcgcaggg

SEQ ID NO: 1597 - RNA, 21 nt, synthetic construct
  source 1..21: mol_type = other RNA
caacccccaccctcgcagggc

SEQ ID NO: 1598 - RNA, 21 nt, synthetic construct
  source 1..21: mol_type = other RNA
aacccccaccctcgcagggcc

SEQ ID NO: 1599 - RNA, 21 nt, synthetic construct
  source 1..21: mol_type = other RNA
acccccaccctcgcagggccg

SEQ ID NO: 1600 - RNA, 21 nt, synthetic construct
  source 1..21: mol_type = other RNA
cccccaccctcgcagggccgg

SEQ ID NO: 1601 - RNA, 21 nt, synthetic construct
  source 1..21: mol_type = other RNA
ccccaccctcgcagggccggt

SEQ ID NO: 1602 - RNA, 21 nt, synthetic construct
  source 1..21: mol_type = other RNA
cccaccctcgcagggccggtg

SEQ ID NO: 1603 - RNA, 21 nt, synthetic construct
  source 1..21: mol_type = other RNA
ccaccctcgcagggccggtgg

SEQ ID NO: 1604 - RNA, 21 nt, synthetic construct
  source 1..21: mol_type = other RNA
caccctcgcagggccggtggg

SEQ ID NO: 1605 - RNA, 21 nt, synthetic construct
  source 1..21: mol_type = other RNA
accctcgcagggccggtggga

SEQ ID NO: 1606 - RNA, 21 nt, synthetic construct
  source 1..21: mol_type = other RNA
ccctcgcagggccggtgggaa

SEQ ID NO: 1607 - RNA, 21 nt, synthetic construct
  source 1..21: mol_type = other RNA
cctcgcagggccggtgggaag

SEQ ID NO: 1608 - RNA, 21 nt, synthetic construct
  source 1..21: mol_type = other RNA
ctcgcagggccggtgggaaga

SEQ ID NO: 1609 - RNA, 21 nt, synthetic construct
  source 1..21: mol_type = other RNA
tcgcagggccggtgggaagac

SEQ ID NO: 1610 - RNA, 21 nt, synthetic construct
  source 1..21: mol_type = other RNA
cgcagggccggtgggaagaca

SEQ ID NO: 1611 - RNA, 21 nt, synthetic construct
  source 1..21: mol_type = other RNA
gcagggccggtgggaagacac

SEQ ID NO: 1612 - RNA, 21 nt, synthetic construct
  source 1..21: mol_type = other RNA
cagggccggtgggaagacaca

SEQ ID NO: 1613 - RNA, 21 nt, synthetic construct
  source 1..21: mol_type = other RNA
agggccggtgggaagacacaa

SEQ ID NO: 1614 - RNA, 21 nt, synthetic construct
  source 1..21: mol_type = other RNA
gggccggtgggaagacacaaa

SEQ ID NO: 1615 - RNA, 21 nt, synthetic construct
  source 1..21: mol_type = other RNA
ggccggtgggaagacacaaag

SEQ ID NO: 1616 - RNA, 21 nt, synthetic construct
  source 1..21: mol_type = other RNA
gccggtgggaagacacaaagt

SEQ ID NO: 1617 - RNA, 21 nt, synthetic construct
  source 1..21: mol_type = other RNA
ccggtgggaagacacaaagtg

SEQ ID NO: 1618 - RNA, 21 nt, synthetic construct
  source 1..21: mol_type = other RNA
cggtgggaagacacaaagtga

SEQ ID NO: 1619 - RNA, 21 nt, synthetic construct
  source 1..21: mol_type = other RNA
ggtgggaagacacaaagtgat

SEQ ID NO: 1620 - RNA, 21 nt, synthetic construct
  source 1..21: mol_type = other RNA
gtgggaagacacaaagtgatg

SEQ ID NO: 1621 - RNA, 21 nt, synthetic construct
  source 1..21: mol_type = other RNA
tgggaagacacaaagtgatgt

SEQ ID NO: 1622 - RNA, 21 nt, synthetic construct
  source 1..21: mol_type = other RNA
gaagacacaaagtgatgtggg

SEQ ID NO: 1623 - RNA, 21 nt, synthetic construct
  source 1..21: mol_type = other RNA
aagacacaaagtgatgtgggc

SEQ ID NO: 1624 - RNA, 21 nt, synthetic construct
  source 1..21: mol_type = other RNA
agacacaaagtgatgtgggca

SEQ ID NO: 1625 - RNA, 21 nt, synthetic construct
  source 1..21: mol_type = other RNA
gacacaaagtgatgtgggcaa

SEQ ID NO: 1626 - RNA, 21 nt, synthetic construct
  source 1..21: mol_type = other RNA
acacaaagtgatgtgggcaag

SEQ ID NO: 1627 - RNA, 21 nt, synthetic construct
  source 1..21: mol_type = other RNA
cacaaagtgatgtgggcaagt

SEQ ID NO: 1628 - RNA, 21 nt, synthetic construct
  source 1..21: mol_type = other RNA
acaaagtgatgtgggcaagtg

SEQ ID NO: 1629 - RNA, 21 nt, synthetic construct
  source 1..21: mol_type = other RNA
caaagtgatgtgggcaagtgc

SEQ ID NO: 1630 - RNA, 21 nt, synthetic construct
  source 1..21: mol_type = other RNA
aaagtgatgtgggcaagtgcc

SEQ ID NO: 1631 - RNA, 21 nt, synthetic construct
  source 1..21: mol_type = other RNA
aagtgatgtgggcaagtgcca

SEQ ID NO: 1632 - RNA, 21 nt, synthetic construct
  source 1..21: mol_type = other RNA
agtgatgtgggcaagtgccag

SEQ ID NO: 1633 - RNA, 21 nt, synthetic construct
  source 1..21: mol_type = other RNA
gtgatgtgggcaagtgccagg

SEQ ID NO: 1634 - RNA, 21 nt, synthetic construct
  source 1..21: mol_type = other RNA
tgatgtgggcaagtgccaggc

SEQ ID NO: 1635 - RNA, 21 nt, synthetic construct
  source 1..21: mol_type = other RNA
gatgtgggcaagtgccaggcc

SEQ ID NO: 1636 - RNA, 21 nt, synthetic construct
  source 1..21: mol_type = other RNA
atgtgggcaagtgccaggccc

SEQ ID NO: 1637 - RNA, 21 nt, synthetic construct
  source 1..21: mol_type = other RNA
tgtgggcaagtgccaggccca

SEQ ID NO: 1638 - RNA, 21 nt, synthetic construct
  source 1..21: mol_type = other RNA
gtgggcaagtgccaggcccac

SEQ ID NO: 1639 - RNA, 21 nt, synthetic construct
  source 1..21: mol_type = other RNA
tgggcaagtgccaggcccaca

SEQ ID NO: 1640 - RNA, 21 nt, synthetic construct
  source 1..21: mol_type = other RNA
gggcaagtgccaggcccacat

SEQ ID NO: 1641 - RNA, 21 nt, synthetic construct
  source 1..21: mol_type = other RNA
ggcaagtgccaggcccacatg

SEQ ID NO: 1642 - RNA, 21 nt, synthetic construct
  source 1..21: mol_type = other RNA
gcaagtgccaggcccacatgg

SEQ ID NO: 1643 - RNA, 21 nt, synthetic construct
  source 1..21: mol_type = other RNA
caagtgccaggcccacatggt

SEQ ID NO: 1644 - RNA, 21 nt, synthetic construct
  source 1..21: mol_type = other RNA
aagtgccaggcccacatggta

SEQ ID NO: 1645 - RNA, 21 nt, synthetic construct
  source 1..21: mol_type = other RNA
agtgccaggcccacatggtaa

SEQ ID NO: 1646 - RNA, 21 nt, synthetic construct
  source 1..21: mol_type = other RNA
gtgccaggcccacatggtaag

SEQ ID NO: 1647 - RNA, 21 nt, synthetic construct
  source 1..21: mol_type = other RNA
tgccaggcccacatggtaagt

SEQ ID NO: 1648 - RNA, 21 nt, synthetic construct
  source 1..21: mol_type = other RNA
gccaggcccacatggtaagta

SEQ ID NO: 1649 - RNA, 21 nt, synthetic construct
  source 1..21: mol_type = other RNA
ccaggcccacatggtaagtac

SEQ ID NO: 1650 - RNA, 21 nt, synthetic construct
  source 1..21: mol_type = other RNA
caggcccacatggtaagtacc

SEQ ID NO: 1651 - RNA, 21 nt, synthetic construct
  source 1..21: mol_type = other RNA
aggcccacatggtaagtaccc

SEQ ID NO: 1652 - RNA, 21 nt, synthetic construct
  source 1..21: mol_type = other RNA
ggcccacatggtaagtaccca

SEQ ID NO: 1653 - RNA, 21 nt, synthetic construct
  source 1..21: mol_type = other RNA
gcccacatggtaagtacccaa

SEQ ID NO: 1654 - RNA, 21 nt, synthetic construct
  source 1..21: mol_type = other RNA
cccacatggtaagtacccaac

SEQ ID NO: 1655 - RNA, 21 nt, synthetic construct
  source 1..21: mol_type = other RNA
ccacatggtaagtacccaact

SEQ ID NO: 1656 - RNA, 21 nt, synthetic construct
  source 1..21: mol_type = other RNA
atggtaagtacccaactaatc

SEQ ID NO: 1657 - RNA, 21 nt, synthetic construct
  source 1..21: mol_type = other RNA
tggtaagtacccaactaatct

SEQ ID NO: 1658 - RNA, 21 nt, synthetic construct
  source 1..21: mol_type = other RNA
ggtaagtacccaactaatctc

SEQ ID NO: 1659 - RNA, 21 nt, synthetic construct
  source 1..21: mol_type = other RNA
gtaagtacccaactaatctcg

SEQ ID NO: 1660 - RNA, 21 nt, synthetic construct
  source 1..21: mol_type = other RNA
taagtacccaactaatctcgc

SEQ ID NO: 1661 - RNA, 21 nt, synthetic construct
  source 1..21: mol_type = other RNA
aagtacccaactaatctcgcc

SEQ ID NO: 1662 - RNA, 21 nt, synthetic construct
  source 1..21: mol_type = other RNA
agtacccaactaatctcgccc

SEQ ID NO: 1663 - RNA, 21 nt, synthetic construct
  source 1..21: mol_type = other RNA
gtacccaactaatctcgcccc

SEQ ID NO: 1664 - RNA, 21 nt, synthetic construct
  source 1..21: mol_type = other RNA
tacccaactaatctcgcccct

SEQ ID NO: 1665 - RNA, 21 nt, synthetic construct
  source 1..21: mol_type = other RNA
acccaactaatctcgcccctc

SEQ ID NO: 1666 - RNA, 21 nt, synthetic construct
  source 1..21: mol_type = other RNA
cccaactaatctcgcccctct

SEQ ID NO: 1667 - RNA, 21 nt, synthetic construct
  source 1..21: mol_type = other RNA
ccaactaatctcgcccctctc

SEQ ID NO: 1668 - RNA, 21 nt, synthetic construct
  source 1..21: mol_type = other RNA
caactaatctcgcccctctca

SEQ ID NO: 1669 - RNA, 21 nt, synthetic construct
  source 1..21: mol_type = other RNA
aactaatctcgcccctctcag

SEQ ID NO: 1670 - RNA, 21 nt, synthetic construct
  source 1..21: mol_type = other RNA
actaatctcgcccctctcagg

SEQ ID NO: 1671 - RNA, 21 nt, synthetic construct
  source 1..21: mol_type = other RNA
ctaatctcgcccctctcagga

SEQ ID NO: 1672 - RNA, 21 nt, synthetic construct
  source 1..21: mol_type = other RNA
taatctcgcccctctcaggac

SEQ ID NO: 1673 - RNA, 21 nt, synthetic construct
  source 1..21: mol_type = other RNA
aatctcgcccctctcaggacc

SEQ ID NO: 1674 - RNA, 21 nt, synthetic construct
  source 1..21: mol_type = other RNA
atctcgcccctctcaggacct

SEQ ID NO: 1675 - RNA, 21 nt, synthetic construct
  source 1..21: mol_type = other RNA
tctcgcccctctcaggaccta

SEQ ID NO: 1676 - RNA, 21 nt, synthetic construct
  source 1..21: mol_type = other RNA
ctcgcccctctcaggacctac

SEQ ID NO: 1677 - RNA, 22 nt, synthetic construct
  source 1..22: mol_type = other RNA
tcttttaaaaattacctagaaa

SEQ ID NO: 1678 - RNA, 22 nt, synthetic construct
  source 1..22: mol_type = other RNA
ttaaaaattacctagaaataag

SEQ ID NO: 1679 - RNA, 22 nt, synthetic construct
  source 1..22: mol_type = other RNA
taaaaattacctagaaataagg

SEQ ID NO: 1680 - RNA, 22 nt, synthetic construct
  source 1..22: mol_type = other RNA
aaaaattacctagaaataaggt

SEQ ID NO: 1681 - RNA, 22 nt, synthetic construct
  source 1..22: mol_type = other RNA
aaaattacctagaaataaggtt

SEQ ID NO: 1682 - RNA, 22 nt, synthetic construct
  source 1..22: mol_type = other RNA
aaattacctagaaataaggttt

SEQ ID NO: 1683 - RNA, 22 nt, synthetic construct
  source 1..22: mol_type = other RNA
aattacctagaaataaggtttc

SEQ ID NO: 1684 - RNA, 22 nt, synthetic construct
  source 1..22: mol_type = other RNA
attacctagaaataaggtttct

SEQ ID NO: 1685 - RNA, 22 nt, synthetic construct
  source 1..22: mol_type = other RNA
ttacctagaaataaggtttctt

SEQ ID NO: 1686 - RNA, 22 nt, synthetic construct
  source 1..22: mol_type = other RNA
tacctagaaataaggtttcttt

SEQ ID NO: 1687 - RNA, 22 nt, synthetic construct
  source 1..22: mol_type = other RNA
acctagaaataaggtttcttta

SEQ ID NO: 1688 - RNA, 22 nt, synthetic construct
  source 1..22: mol_type = other RNA
cctagaaataaggtttctttaa

SEQ ID NO: 1689 - RNA, 22 nt, synthetic construct
  source 1..22: mol_type = other RNA
ctagaaataaggtttctttaat

SEQ ID NO: 1690 - RNA, 22 nt, synthetic construct
  source 1..22: mol_type = other RNA
tagaaataaggtttctttaatt

SEQ ID NO: 1691 - RNA, 22 nt, synthetic construct
  source 1..22: mol_type = other RNA
agaaataaggtttctttaattg

SEQ ID NO: 1692 - RNA, 22 nt, synthetic construct
  source 1..22: mol_type = other RNA
gaaataaggtttctttaattgc

SEQ ID NO: 1693 - RNA, 22 nt, synthetic construct
  source 1..22: mol_type = other RNA
aaataaggtttctttaattgct

SEQ ID NO: 1694 - RNA, 22 nt, synthetic construct
  source 1..22: mol_type = other RNA
aataaggtttctttaattgctg

SEQ ID NO: 1695 - RNA, 22 nt, synthetic construct
  source 1..22: mol_type = other RNA
ataaggtttctttaattgctgg

SEQ ID NO: 1696 - RNA, 22 nt, synthetic construct
  source 1..22: mol_type = other RNA
taaggtttctttaattgctggt

SEQ ID NO: 1697 - RNA, 22 nt, synthetic construct
  source 1..22: mol_type = other RNA
aaggtttctttaattgctggtt

SEQ ID NO: 1698 - RNA, 22 nt, synthetic construct
  source 1..22: mol_type = other RNA
aggtttctttaattgctggtta

SEQ ID NO: 1699 - RNA, 22 nt, synthetic construct
  source 1..22: mol_type = other RNA
ggtttctttaattgctggttaa

SEQ ID NO: 1700 - RNA, 22 nt, synthetic construct
  source 1..22: mol_type = other RNA
gtttctttaattgctggttaaa

SEQ ID NO: 1701 - RNA, 22 nt, synthetic construct
  source 1..22: mol_type = other RNA
tttctttaattgctggttaaaa

SEQ ID NO: 1702 - RNA, 22 nt, synthetic construct
  source 1..22: mol_type = other RNA
ttctttaattgctggttaaaat

SEQ ID NO: 1703 - RNA, 22 nt, synthetic construct
  source 1..22: mol_type = other RNA
tctttaattgctggttaaaatg

SEQ ID NO: 1704 - RNA, 22 nt, synthetic construct
  source 1..22: mol_type = other RNA
ctttaattgctggttaaaatgc

SEQ ID NO: 1705 - RNA, 22 nt, synthetic construct
  source 1..22: mol_type = other RNA
tttaattgctggttaaaatgct

SEQ ID NO: 1706 - RNA, 22 nt, synthetic construct
  source 1..22: mol_type = other RNA
ttaattgctggttaaaatgctc

SEQ ID NO: 1707 - RNA, 22 nt, synthetic construct
  source 1..22: mol_type = other RNA
taattgctggttaaaatgctcc

SEQ ID NO: 1708 - RNA, 22 nt, synthetic construct
  source 1..22: mol_type = other RNA
aattgctggttaaaatgctccc

SEQ ID NO: 1709 - RNA, 22 nt, synthetic construct
  source 1..22: mol_type = other RNA
attgctggttaaaatgctcccg

SEQ ID NO: 1710 - RNA, 22 nt, synthetic construct
  source 1..22: mol_type = other RNA
ttgctggttaaaatgctcccgt

SEQ ID NO: 1711 - RNA, 22 nt, synthetic construct
  source 1..22: mol_type = other RNA
tgctggttaaaatgctcccgtg

SEQ ID NO: 1712 - RNA, 22 nt, synthetic construct
  source 1..22: mol_type = other RNA
gctggttaaaatgctcccgtgc

SEQ ID NO: 1713 - RNA, 22 nt, synthetic construct
  source 1..22: mol_type = other RNA
ctggttaaaatgctcccgtgca

SEQ ID NO: 1714 - RNA, 22 nt, synthetic construct
  source 1..22: mol_type = other RNA
tggttaaaatgctcccgtgcag

SEQ ID NO: 1715 - RNA, 22 nt, synthetic construct
  source 1..22: mol_type = other RNA
ggttaaaatgctcccgtgcaga

SEQ ID NO: 1716 - RNA, 22 nt, synthetic construct
  source 1..22: mol_type = other RNA
gttaaaatgctcccgtgcagaa

SEQ ID NO: 1717 - RNA, 22 nt, synthetic construct
  source 1..22: mol_type = other RNA
ttaaaatgctcccgtgcagaaa

SEQ ID NO: 1718 - RNA, 22 nt, synthetic construct
  source 1..22: mol_type = other RNA
taaaatgctcccgtgcagaaaa

SEQ ID NO: 1719 - RNA, 22 nt, synthetic construct
  source 1..22: mol_type = other RNA
aaaatgctcccgtgcagaaaac

SEQ ID NO: 1720 - RNA, 22 nt, synthetic construct
  source 1..22: mol_type = other RNA
aaatgctcccgtgcagaaaaca

SEQ ID NO: 1721 - RNA, 22 nt, synthetic construct
  source 1..22: mol_type = other RNA
aatgctcccgtgcagaaaacag

SEQ ID NO: 1722 - RNA, 22 nt, synthetic construct
  source 1..22: mol_type = other RNA
atgctcccgtgcagaaaacagg

SEQ ID NO: 1723 - RNA, 22 nt, synthetic construct
  source 1..22: mol_type = other RNA
tgctcccgtgcagaaaacagga

SEQ ID NO: 1724 - RNA, 22 nt, synthetic construct
  source 1..22: mol_type = other RNA
gctcccgtgcagaaaacaggaa

SEQ ID NO: 1725 - RNA, 22 nt, synthetic construct
  source 1..22: mol_type = other RNA
ctcccgtgcagaaaacaggaaa

SEQ ID NO: 1726 - RNA, 22 nt, synthetic construct
  source 1..22: mol_type = other RNA
tcccgtgcagaaaacaggaaag

SEQ ID NO: 1727 - RNA, 22 nt, synthetic construct
  source 1..22: mol_type = other RNA
cccgtgcagaaaacaggaaaga

SEQ ID NO: 1728 - RNA, 22 nt, synthetic construct
  source 1..22: mol_type = other RNA
ccgtgcagaaaacaggaaagaa

SEQ ID NO: 1729 - RNA, 22 nt, synthetic construct
  source 1..22: mol_type = other RNA
cgtgcagaaaacaggaaagaac

SEQ ID NO: 1730 - RNA, 22 nt, synthetic construct
  source 1..22: mol_type = other RNA
gtgcagaaaacaggaaagaacc

SEQ ID NO: 1731 - RNA, 22 nt, synthetic construct
  source 1..22: mol_type = other RNA
gcagaaaacaggaaagaacctg

SEQ ID NO: 1732 - RNA, 22 nt, synthetic construct
  source 1..22: mol_type = other RNA
cagaaaacaggaaagaacctgc

SEQ ID NO: 1733 - RNA, 22 nt, synthetic construct
  source 1..22: mol_type = other RNA
agaaaacaggaaagaacctgcc

SEQ ID NO: 1734 - RNA, 22 nt, synthetic construct
  source 1..22: mol_type = other RNA
gaaaacaggaaagaacctgcct

SEQ ID NO: 1735 - RNA, 22 nt, synthetic construct
  source 1..22: mol_type = other RNA
aaaacaggaaagaacctgcctg

SEQ ID NO: 1736 - RNA, 22 nt, synthetic construct
  source 1..22: mol_type = other RNA
aaacaggaaagaacctgcctgg

SEQ ID NO: 1737 - RNA, 22 nt, synthetic construct
  source 1..22: mol_type = other RNA
aacaggaaagaacctgcctggt

SEQ ID NO: 1738 - RNA, 22 nt, synthetic construct
  source 1..22: mol_type = other RNA
acaggaaagaacctgcctggtt

SEQ ID NO: 1739 - RNA, 22 nt, synthetic construct
  source 1..22: mol_type = other RNA
caggaaagaacctgcctggttc

SEQ ID NO: 1740 - RNA, 22 nt, synthetic construct
  source 1..22: mol_type = other RNA
aggaaagaacctgcctggttcc

SEQ ID NO: 1741 - RNA, 22 nt, synthetic construct
  source 1..22: mol_type = other RNA
ggaaagaacctgcctggttcct

SEQ ID NO: 1742 - RNA, 22 nt, synthetic construct
  source 1..22: mol_type = other RNA
gaaagaacctgcctggttcctt

SEQ ID NO: 1743 - RNA, 22 nt, synthetic construct
  source 1..22: mol_type = other RNA
aaagaacctgcctggttcctta

SEQ ID NO: 1744 - RNA, 22 nt, synthetic construct
  source 1..22: mol_type = other RNA
aagaacctgcctggttccttag

SEQ ID NO: 1745 - RNA, 22 nt, synthetic construct
  source 1..22: mol_type = other RNA
agaacctgcctggttccttagc

SEQ ID NO: 1746 - RNA, 22 nt, synthetic construct
  source 1..22: mol_type = other RNA
gaacctgcctggttccttagca

SEQ ID NO: 1747 - RNA, 22 nt, synthetic construct
  source 1..22: mol_type = other RNA
aacctgcctggttccttagcaa

SEQ ID NO: 1748 - RNA, 22 nt, synthetic construct
  source 1..22: mol_type = other RNA
acctgcctggttccttagcaaa

SEQ ID NO: 1749 - RNA, 22 nt, synthetic construct
  source 1..22: mol_type = other RNA
cctgcctggttccttagcaaat

SEQ ID NO: 1750 - RNA, 22 nt, synthetic construct
  source 1..22: mol_type = other RNA
ctgcctggttccttagcaaatc

SEQ ID NO: 1751 - RNA, 22 nt, synthetic construct
  source 1..22: mol_type = other RNA
tgcctggttccttagcaaatct

SEQ ID NO: 1752 - RNA, 22 nt, synthetic construct
  source 1..22: mol_type = other RNA
gcctggttccttagcaaatctg

SEQ ID NO: 1753 - RNA, 22 nt, synthetic construct
  source 1..22: mol_type = other RNA
cctggttccttagcaaatctga

SEQ ID NO: 1754 - RNA, 22 nt, synthetic construct
  source 1..22: mol_type = other RNA
ctggttccttagcaaatctgag

SEQ ID NO: 1755 - RNA, 22 nt, synthetic construct
  source 1..22: mol_type = other RNA
tggttccttagcaaatctgagt

SEQ ID NO: 1756 - RNA, 22 nt, synthetic construct
  source 1..22: mol_type = other RNA
ggttccttagcaaatctgagtt

SEQ ID NO: 1757 - RNA, 22 nt, synthetic construct
  source 1..22: mol_type = other RNA
gttccttagcaaatctgagttc

SEQ ID NO: 1758 - RNA, 22 nt, synthetic construct
  source 1..22: mol_type = other RNA
ttccttagcaaatctgagttcc

SEQ ID NO: 1759 - RNA, 22 nt, synthetic construct
  source 1..22: mol_type = other RNA
tccttagcaaatctgagttcca

SEQ ID NO: 1760 - RNA, 22 nt, synthetic construct
  source 1..22: mol_type = other RNA
ccttagcaaatctgagttccag

SEQ ID NO: 1761 - RNA, 22 nt, synthetic construct
  source 1..22: mol_type = other RNA
cttagcaaatctgagttccagt

SEQ ID NO: 1762 - RNA, 22 nt, synthetic construct
  source 1..22: mol_type = other RNA
ttagcaaatctgagttccagtc

SEQ ID NO: 1763 - RNA, 22 nt, synthetic construct
  source 1..22: mol_type = other RNA
tagcaaatctgagttccagtcc

SEQ ID NO: 1764 - RNA, 22 nt, synthetic construct
  source 1..22: mol_type = other RNA
agcaaatctgagttccagtccc

SEQ ID NO: 1765 - RNA, 22 nt, synthetic construct
  source 1..22: mol_type = other RNA
gcaaatctgagttccagtccca

SEQ ID NO: 1766 - RNA, 22 nt, synthetic construct
  source 1..22: mol_type = other RNA
caaatctgagttccagtcccag

SEQ ID NO: 1767 - RNA, 22 nt, synthetic construct
  source 1..22: mol_type = other RNA
aaatctgagttccagtcccagg

SEQ ID NO: 1768 - RNA, 22 nt, synthetic construct
  source 1..22: mol_type = other RNA
aatctgagttccagtcccaggt

SEQ ID NO: 1769 - RNA, 22 nt, synthetic construct
  source 1..22: mol_type = other RNA
tctgagttccagtcccaggtcc

SEQ ID NO: 1770 - RNA, 22 nt, synthetic construct
  source 1..22: mol_type = other RNA
gagttccagtcccaggtccact

SEQ ID NO: 1771 - RNA, 22 nt, synthetic construct
  source 1..22: mol_type = other RNA
agttccagtcccaggtccacta

SEQ ID NO: 1772 - RNA, 22 nt, synthetic construct
  source 1..22: mol_type = other RNA
gttccagtcccaggtccactac

SEQ ID NO: 1773 - RNA, 22 nt, synthetic construct
  source 1..22: mol_type = other RNA
ttccagtcccaggtccactact

SEQ ID NO: 1774 - RNA, 22 nt, synthetic construct
  source 1..22: mol_type = other RNA
tccagtcccaggtccactacta

SEQ ID NO: 1775 - RNA, 22 nt, synthetic construct
  source 1..22: mol_type = other RNA
ccagtcccaggtccactactat

SEQ ID NO: 1776 - RNA, 22 nt, synthetic construct
  source 1..22: mol_type = other RNA
cagtcccaggtccactactatt

SEQ ID NO: 1777 - RNA, 22 nt, synthetic construct
  source 1..22: mol_type = other RNA
agtcccaggtccactactatta

SEQ ID NO: 1778 - RNA, 22 nt, synthetic construct
  source 1..22: mol_type = other RNA
gtcccaggtccactactattag

SEQ ID NO: 1779 - RNA, 22 nt, synthetic construct
  source 1..22: mol_type = other RNA
tcccaggtccactactattagc

SEQ ID NO: 1780 - RNA, 22 nt, synthetic construct
  source 1..22: mol_type = other RNA
cccaggtccactactattagct

SEQ ID NO: 1781 - RNA, 22 nt, synthetic construct
  source 1..22: mol_type = other RNA
ccaggtccactactattagctg

SEQ ID NO: 1782 - RNA, 22 nt, synthetic construct
  source 1..22: mol_type = other RNA
caggtccactactattagctga

SEQ ID NO: 1783 - RNA, 22 nt, synthetic construct
  source 1..22: mol_type = other RNA
aggtccactactattagctgag

SEQ ID NO: 1784 - RNA, 22 nt, synthetic construct
  source 1..22: mol_type = other RNA
ggtccactactattagctgagt

SEQ ID NO: 1785 - RNA, 22 nt, synthetic construct
  source 1..22: mol_type = other RNA
gtccactactattagctgagtg

SEQ ID NO: 1786 - RNA, 22 nt, synthetic construct
  source 1..22: mol_type = other RNA
tccactactattagctgagtga

SEQ ID NO: 1787 - RNA, 22 nt, synthetic construct
  source 1..22: mol_type = other RNA
cactactattagctgagtgacg

SEQ ID NO: 1788 - RNA, 22 nt, synthetic construct
  source 1..22: mol_type = other RNA
actactattagctgagtgacgc

SEQ ID NO: 1789 - RNA, 22 nt, synthetic construct
  source 1..22: mol_type = other RNA
ctactattagctgagtgacgct

SEQ ID NO: 1790 - RNA, 22 nt, synthetic construct
  source 1..22: mol_type = other RNA
tactattagctgagtgacgctt

SEQ ID NO: 1791 - RNA, 22 nt, synthetic construct
  source 1..22: mol_type = other RNA
actattagctgagtgacgcttc

SEQ ID NO: 1792 - RNA, 22 nt, synthetic construct
  source 1..22: mol_type = other RNA
ctattagctgagtgacgcttcc

SEQ ID NO: 1793 - RNA, 22 nt, synthetic construct
  source 1..22: mol_type = other RNA
tattagctgagtgacgcttcca

SEQ ID NO: 1794 - RNA, 22 nt, synthetic construct
  source 1..22: mol_type = other RNA
attagctgagtgacgcttccag

SEQ ID NO: 1795 - RNA, 22 nt, synthetic construct
  source 1..22: mol_type = other RNA
ttagctgagtgacgcttccagc

SEQ ID NO: 1796 - RNA, 22 nt, synthetic construct
  source 1..22: mol_type = other RNA
tagctgagtgacgcttccagcc

SEQ ID NO: 1797 - RNA, 22 nt, synthetic construct
  source 1..22: mol_type = other RNA
agctgagtgacgcttccagccc

SEQ ID NO: 1798 - RNA, 22 nt, synthetic construct
  source 1..22: mol_type = other RNA
gctgagtgacgcttccagcccg

SEQ ID NO: 1799 - RNA, 22 nt, synthetic construct
  source 1..22: mol_type = other RNA
ctgagtgacgcttccagcccgt

SEQ ID NO: 1800 - RNA, 22 nt, synthetic construct
  source 1..22: mol_type = other RNA
tgagtgacgcttccagcccgtt

SEQ ID NO: 1801 - RNA, 22 nt, synthetic construct
  source 1..22: mol_type = other RNA
gagtgacgcttccagcccgttt

SEQ ID NO: 1802 - RNA, 22 nt, synthetic construct
  source 1..22: mol_type = other RNA
agtgacgcttccagcccgtttc

SEQ ID NO: 1803 - RNA, 22 nt, synthetic construct
  source 1..22: mol_type = other RNA
gtgacgcttccagcccgtttcc

SEQ ID NO: 1804 - RNA, 22 nt, synthetic construct
  source 1..22: mol_type = other RNA
tgacgcttccagcccgtttccc

SEQ ID NO: 1805 - RNA, 22 nt, synthetic construct
  source 1..22: mol_type = other RNA
gacgcttccagcccgtttcccc

SEQ ID NO: 1806 - RNA, 22 nt, synthetic construct
  source 1..22: mol_type = other RNA
acgcttccagcccgtttccccc

SEQ ID NO: 1807 - RNA, 22 nt, synthetic construct
  source 1..22: mol_type = other RNA
cgcttccagcccgtttcccccg

SEQ ID NO: 1808 - RNA, 22 nt, synthetic construct
  source 1..22: mol_type = other RNA
gcttccagcccgtttcccccgc

SEQ ID NO: 1809 - RNA, 22 nt, synthetic construct
  source 1..22: mol_type = other RNA
cttccagcccgtttcccccgcc

SEQ ID NO: 1810 - RNA, 22 nt, synthetic construct
  source 1..22: mol_type = other RNA
ttccagcccgtttcccccgcct

SEQ ID NO: 1811 - RNA, 22 nt, synthetic construct
  source 1..22: mol_type = other RNA
tccagcccgtttcccccgcctg

SEQ ID NO: 1812 - RNA, 22 nt, synthetic construct
  source 1..22: mol_type = other RNA
ccagcccgtttcccccgcctgg

SEQ ID NO: 1813 - RNA, 22 nt, synthetic construct
  source 1..22: mol_type = other RNA
cagcccgtttcccccgcctgga

SEQ ID NO: 1814 - RNA, 22 nt, synthetic construct
  source 1..22: mol_type = other RNA
agcccgtttcccccgcctggaa

SEQ ID NO: 1815 - RNA, 22 nt, synthetic construct
  source 1..22: mol_type = other RNA
gcccgtttcccccgcctggaaa

SEQ ID NO: 1816 - RNA, 22 nt, synthetic construct
  source 1..22: mol_type = other RNA
cccgtttcccccgcctggaaac

SEQ ID NO: 1817 - RNA, 22 nt, synthetic construct
  source 1..22: mol_type = other RNA
ccgtttcccccgcctggaaact

SEQ ID NO: 1818 - RNA, 22 nt, synthetic construct
  source 1..22: mol_type = other RNA
cgtttcccccgcctggaaactg

SEQ ID NO: 1819 - RNA, 22 nt, synthetic construct
  source 1..22: mol_type = other RNA
gtttcccccgcctggaaactga

SEQ ID NO: 1820 - RNA, 22 nt, synthetic construct
  source 1..22: mol_type = other RNA
tttcccccgcctggaaactgag

SEQ ID NO: 1821 - RNA, 22 nt, synthetic construct
  source 1..22: mol_type = other RNA
ttcccccgcctggaaactgagg

SEQ ID NO: 1822 - RNA, 22 nt, synthetic construct
  source 1..22: mol_type = other RNA
tcccccgcctggaaactgagga

SEQ ID NO: 1823 - RNA, 22 nt, synthetic construct
  source 1..22: mol_type = other RNA
cccccgcctggaaactgaggac

SEQ ID NO: 1824 - RNA, 22 nt, synthetic construct
  source 1..22: mol_type = other RNA
ccccgcctggaaactgaggacg

SEQ ID NO: 1825 - RNA, 22 nt, synthetic construct
  source 1..22: mol_type = other RNA
cccgcctggaaactgaggacgg

SEQ ID NO: 1826 - RNA, 22 nt, synthetic construct
  source 1..22: mol_type = other RNA
ccgcctggaaactgaggacggc

SEQ ID NO: 1827 - RNA, 22 nt, synthetic construct
  source 1..22: mol_type = other RNA
cgcctggaaactgaggacggca

SEQ ID NO: 1828 - RNA, 22 nt, synthetic construct
  source 1..22: mol_type = other RNA
gcctggaaactgaggacggcaa

SEQ ID NO: 1829 - RNA, 22 nt, synthetic construct
  source 1..22: mol_type = other RNA
cctggaaactgaggacggcaac

SEQ ID NO: 1830 - RNA, 22 nt, synthetic construct
  source 1..22: mol_type = other RNA
ctggaaactgaggacggcaacc

SEQ ID NO: 1831 - RNA, 22 nt, synthetic construct
  source 1..22: mol_type = other RNA
tggaaactgaggacggcaaccc

SEQ ID NO: 1832 - RNA, 22 nt, synthetic construct
  source 1..22: mol_type = other RNA
ggaaactgaggacggcaacccc

SEQ ID NO: 1833 - RNA, 22 nt, synthetic construct
  source 1..22: mol_type = other RNA
gaaactgaggacggcaaccccc

SEQ ID NO: 1834 - RNA, 22 nt, synthetic construct
  source 1..22: mol_type = other RNA
aaactgaggacggcaaccccca

SEQ ID NO: 1835 - RNA, 22 nt, synthetic construct
  source 1..22: mol_type = other RNA
aactgaggacggcaacccccac

SEQ ID NO: 1836 - RNA, 22 nt, synthetic construct
  source 1..22: mol_type = other RNA
actgaggacggcaacccccacc

SEQ ID NO: 1837 - RNA, 22 nt, synthetic construct
  source 1..22: mol_type = other RNA
ctgaggacggcaacccccaccc

SEQ ID NO: 1838 - RNA, 22 nt, synthetic construct
  source 1..22: mol_type = other RNA
tgaggacggcaacccccaccct

SEQ ID NO: 1839 - RNA, 22 nt, synthetic construct
  source 1..22: mol_type = other RNA
gaggacggcaacccccaccctc

SEQ ID NO: 1840 - RNA, 22 nt, synthetic construct
  source 1..22: mol_type = other RNA
aggacggcaacccccaccctcg

SEQ ID NO: 1841 - RNA, 22 nt, synthetic construct
  source 1..22: mol_type = other RNA
ggacggcaacccccaccctcgc

SEQ ID NO: 1842 - RNA, 22 nt, synthetic construct
  source 1..22: mol_type = other RNA
gacggcaacccccaccctcgca

SEQ ID NO: 1843 - RNA, 22 nt, synthetic construct
  source 1..22: mol_type = other RNA
acggcaacccccaccctcgcag

SEQ ID NO: 1844 - RNA, 22 nt, synthetic construct
  source 1..22: mol_type = other RNA
cggcaacccccaccctcgcagg

SEQ ID NO: 1845 - RNA, 22 nt, synthetic construct
  source 1..22: mol_type = other RNA
ggcaacccccaccctcgcaggg

SEQ ID NO: 1846 - RNA, 22 nt, synthetic construct
  source 1..22: mol_type = other RNA
gcaacccccaccctcgcagggc

SEQ ID NO: 1847 - RNA, 22 nt, synthetic construct
  source 1..22: mol_type = other RNA
caacccccaccctcgcagggcc

SEQ ID NO: 1848 - RNA, 22 nt, synthetic construct
  source 1..22: mol_type = other RNA
aacccccaccctcgcagggccg

SEQ ID NO: 1849 - RNA, 22 nt, synthetic construct
  source 1..22: mol_type = other RNA
acccccaccctcgcagggccgg

SEQ ID NO: 1850 - RNA, 22 nt, synthetic construct
  source 1..22: mol_type = other RNA
cccccaccctcgcagggccggt

SEQ ID NO: 1851 - RNA, 22 nt, synthetic construct
  source 1..22: mol_type = other RNA
ccccaccctcgcagggccggtg

SEQ ID NO: 1852 - RNA, 22 nt, synthetic construct
  source 1..22: mol_type = other RNA
cccaccctcgcagggccggtgg

SEQ ID NO: 1853 - RNA, 22 nt, synthetic construct
  source 1..22: mol_type = other RNA
ccaccctcgcagggccggtggg

SEQ ID NO: 1854 - RNA, 22 nt, synthetic construct
  source 1..22: mol_type = other RNA
caccctcgcagggccggtggga

SEQ ID NO: 1855 - RNA, 22 nt, synthetic construct
  source 1..22: mol_type = other RNA
accctcgcagggccggtgggaa

SEQ ID NO: 1856 - RNA, 22 nt, synthetic construct
  source 1..22: mol_type = other RNA
ccctcgcagggccggtgggaag

SEQ ID NO: 1857 - RNA, 22 nt, synthetic construct
  source 1..22: mol_type = other RNA
cctcgcagggccggtgggaaga

SEQ ID NO: 1858 - RNA, 22 nt, synthetic construct
  source 1..22: mol_type = other RNA
ctcgcagggccggtgggaagac

SEQ ID NO: 1859 - RNA, 22 nt, synthetic construct
  source 1..22: mol_type = other RNA
tcgcagggccggtgggaagaca

SEQ ID NO: 1860 - RNA, 22 nt, synthetic construct
  source 1..22: mol_type = other RNA
cgcagggccggtgggaagacac

SEQ ID NO: 1861 - RNA, 22 nt, synthetic construct
  source 1..22: mol_type = other RNA
gcagggccggtgggaagacaca

SEQ ID NO: 1862 - RNA, 22 nt, synthetic construct
  source 1..22: mol_type = other RNA
cagggccggtgggaagacacaa

SEQ ID NO: 1863 - RNA, 22 nt, synthetic construct
  source 1..22: mol_type = other RNA
agggccggtgggaagacacaaa

SEQ ID NO: 1864 - RNA, 22 nt, synthetic construct
  source 1..22: mol_type = other RNA
gggccggtgggaagacacaaag

SEQ ID NO: 1865 - RNA, 22 nt, synthetic construct
  source 1..22: mol_type = other RNA
ggccggtgggaagacacaaagt

SEQ ID NO: 1866 - RNA, 22 nt, synthetic construct
  source 1..22: mol_type = other RNA
gccggtgggaagacacaaagtg

SEQ ID NO: 1867 - RNA, 22 nt, synthetic construct
  source 1..22: mol_type = other RNA
ccggtgggaagacacaaagtga

SEQ ID NO: 1868 - RNA, 22 nt, synthetic construct
  source 1..22: mol_type = other RNA
cggtgggaagacacaaagtgat

SEQ ID NO: 1869 - RNA, 22 nt, synthetic construct
  source 1..22: mol_type = other RNA
ggtgggaagacacaaagtgatg

SEQ ID NO: 1870 - RNA, 22 nt, synthetic construct
  source 1..22: mol_type = other RNA
gtgggaagacacaaagtgatgt

SEQ ID NO: 1871 - RNA, 22 nt, synthetic construct
  source 1..22: mol_type = other RNA
tgggaagacacaaagtgatgtg

SEQ ID NO: 1872 - RNA, 22 nt, synthetic construct
  source 1..22: mol_type = other RNA
gggaagacacaaagtgatgtgg

SEQ ID NO: 1873 - RNA, 22 nt, synthetic construct
  source 1..22: mol_type = other RNA
ggaagacacaaagtgatgtggg

SEQ ID NO: 1874 - RNA, 22 nt, synthetic construct
  source 1..22: mol_type = other RNA
gaagacacaaagtgatgtgggc

SEQ ID NO: 1875 - RNA, 22 nt, synthetic construct
  source 1..22: mol_type = other RNA
aagacacaaagtgatgtgggca

SEQ ID NO: 1876 - RNA, 22 nt, synthetic construct
  source 1..22: mol_type = other RNA
agacacaaagtgatgtgggcaa

SEQ ID NO: 1877 - RNA, 22 nt, synthetic construct
  source 1..22: mol_type = other RNA
gacacaaagtgatgtgggcaag

SEQ ID NO: 1878 - RNA, 22 nt, synthetic construct
  source 1..22: mol_type = other RNA
acacaaagtgatgtgggcaagt

SEQ ID NO: 1879 - RNA, 22 nt, synthetic construct
  source 1..22: mol_type = other RNA
cacaaagtgatgtgggcaagtg

SEQ ID NO: 1880 - RNA, 22 nt, synthetic construct
  source 1..22: mol_type = other RNA
acaaagtgatgtgggcaagtgc

SEQ ID NO: 1881 - RNA, 22 nt, synthetic construct
  source 1..22: mol_type = other RNA
caaagtgatgtgggcaagtgcc

SEQ ID NO: 1882 - RNA, 22 nt, synthetic construct
  source 1..22: mol_type = other RNA
aaagtgatgtgggcaagtgcca

SEQ ID NO: 1883 - RNA, 22 nt, synthetic construct
  source 1..22: mol_type = other RNA
aagtgatgtgggcaagtgccag

SEQ ID NO: 1884 - RNA, 22 nt, synthetic construct
  source 1..22: mol_type = other RNA
agtgatgtgggcaagtgccagg

SEQ ID NO: 1885 - RNA, 22 nt, synthetic construct
  source 1..22: mol_type = other RNA
gtgatgtgggcaagtgccaggc

SEQ ID NO: 1886 - RNA, 22 nt, synthetic construct
  source 1..22: mol_type = other RNA
tgatgtgggcaagtgccaggcc

SEQ ID NO: 1887 - RNA, 22 nt, synthetic construct
  source 1..22: mol_type = other RNA
gatgtgggcaagtgccaggccc

SEQ ID NO: 1888 - RNA, 22 nt, synthetic construct
  source 1..22: mol_type = other RNA
atgtgggcaagtgccaggccca

SEQ ID NO: 1889 - RNA, 22 nt, synthetic construct
  source 1..22: mol_type = other RNA
tgtgggcaagtgccaggcccac

SEQ ID NO: 1890 - RNA, 22 nt, synthetic construct
  source 1..22: mol_type = other RNA
gtgggcaagtgccaggcccaca

SEQ ID NO: 1891 - RNA, 22 nt, synthetic construct
  source 1..22: mol_type = other RNA
tgggcaagtgccaggcccacat

SEQ ID NO: 1892 - RNA, 22 nt, synthetic construct
  source 1..22: mol_type = other RNA
gggcaagtgccaggcccacatg

SEQ ID NO: 1893 - RNA, 22 nt, synthetic construct
  source 1..22: mol_type = other RNA
ggcaagtgccaggcccacatgg

SEQ ID NO: 1894 - RNA, 22 nt, synthetic construct
  source 1..22: mol_type = other RNA
gcaagtgccaggcccacatggt

SEQ ID NO: 1895 - RNA, 22 nt, synthetic construct
  source 1..22: mol_type = other RNA
caagtgccaggcccacatggta

SEQ ID NO: 1896 - RNA, 22 nt, synthetic construct
  source 1..22: mol_type = other RNA
aagtgccaggcccacatggtaa

SEQ ID NO: 1897 - RNA, 22 nt, synthetic construct
  source 1..22: mol_type = other RNA
agtgccaggcccacatggtaag

SEQ ID NO: 1898 - RNA, 22 nt, synthetic construct
  source 1..22: mol_type = other RNA
gtgccaggcccacatggtaagt

SEQ ID NO: 1899 - RNA, 22 nt, synthetic construct
  source 1..22: mol_type = other RNA
tgccaggcccacatggtaagta

SEQ ID NO: 1900 - RNA, 22 nt, synthetic construct
  source 1..22: mol_type = other RNA
gccaggcccacatggtaagtac

SEQ ID NO: 1901 - RNA, 22 nt, synthetic construct
  source 1..22: mol_type = other RNA
ccaggcccacatggtaagtacc

SEQ ID NO: 1902 - RNA, 22 nt, synthetic construct
  source 1..22: mol_type = other RNA
caggcccacatggtaagtaccc

SEQ ID NO: 1903 - RNA, 22 nt, synthetic construct
  source 1..22: mol_type = other RNA
aggcccacatggtaagtaccca

SEQ ID NO: 1904 - RNA, 22 nt, synthetic construct
  source 1..22: mol_type = other RNA
ggcccacatggtaagtacccaa

SEQ ID NO: 1905 - RNA, 22 nt, synthetic construct
  source 1..22: mol_type = other RNA
gcccacatggtaagtacccaac

SEQ ID NO: 1906 - RNA, 22 nt, synthetic construct
  source 1..22: mol_type = other RNA
cccacatggtaagtacccaact

SEQ ID NO: 1907 - RNA, 22 nt, synthetic construct
  source 1..22: mol_type = other RNA
ccacatggtaagtacccaacta

SEQ ID NO: 1908 - RNA, 22 nt, synthetic construct
  source 1..22: mol_type = other RNA
catggtaagtacccaactaatc

SEQ ID NO: 1909 - RNA, 22 nt, synthetic construct
  source 1..22: mol_type = other RNA
atggtaagtacccaactaatct

SEQ ID NO: 1910 - RNA, 22 nt, synthetic construct
  source 1..22: mol_type = other RNA
tggtaagtacccaactaatctc

SEQ ID NO: 1911 - RNA, 22 nt, synthetic construct
  source 1..22: mol_type = other RNA
ggtaagtacccaactaatctcg

SEQ ID NO: 1912 - RNA, 22 nt, synthetic construct
  source 1..22: mol_type = other RNA
gtaagtacccaactaatctcgc

SEQ ID NO: 1913 - RNA, 22 nt, synthetic construct
  source 1..22: mol_type = other RNA
taagtacccaactaatctcgcc

SEQ ID NO: 1914 - RNA, 22 nt, synthetic construct
  source 1..22: mol_type = other RNA
aagtacccaactaatctcgccc

SEQ ID NO: 1915 - RNA, 22 nt, synthetic construct
  source 1..22: mol_type = other RNA
agtacccaactaatctcgcccc

SEQ ID NO: 1916 - RNA, 22 nt, synthetic construct
  source 1..22: mol_type = other RNA
gtacccaactaatctcgcccct

SEQ ID NO: 1917 - RNA, 22 nt, synthetic construct
  source 1..22: mol_type = other RNA
tacccaactaatctcgcccctc

SEQ ID NO: 1918 - RNA, 22 nt, synthetic construct
  source 1..22: mol_type = other RNA
acccaactaatctcgcccctct

SEQ ID NO: 1919 - RNA, 22 nt, synthetic construct
  source 1..22: mol_type = other RNA
cccaactaatctcgcccctctc

SEQ ID NO: 1920 - RNA, 22 nt, synthetic construct
  source 1..22: mol_type = other RNA
ccaactaatctcgcccctctca

SEQ ID NO: 1921 - RNA, 22 nt, synthetic construct
  source 1..22: mol_type = other RNA
caactaatctcgcccctctcag

SEQ ID NO: 1922 - RNA, 22 nt, synthetic construct
  source 1..22: mol_type = other RNA
aactaatctcgcccctctcagg

SEQ ID NO: 1923 - RNA, 22 nt, synthetic construct
  source 1..22: mol_type = other RNA
actaatctcgcccctctcagga

SEQ ID NO: 1924 - RNA, 22 nt, synthetic construct
  source 1..22: mol_type = other RNA
ctaatctcgcccctctcaggac

SEQ ID NO: 1925 - RNA, 22 nt, synthetic construct
  source 1..22: mol_type = other RNA
taatctcgcccctctcaggacc

SEQ ID NO: 1926 - RNA, 22 nt, synthetic construct
  source 1..22: mol_type = other RNA
aatctcgcccctctcaggacct

SEQ ID NO: 1927 - RNA, 22 nt, synthetic construct
  source 1..22: mol_type = other RNA
atctcgcccctctcaggaccta

SEQ ID NO: 1928 - RNA, 22 nt, synthetic construct
  source 1..22: mol_type = other RNA
tctcgcccctctcaggacctac

SEQ ID NO: 1929 - RNA, 23 nt, synthetic construct
  source 1..23: mol_type = other RNA
tcttttaaaaattacctagaaat

SEQ ID NO: 1930 - RNA, 23 nt, synthetic construct
  source 1..23: mol_type = other RNA
tttaaaaattacctagaaataag

SEQ ID NO: 1931 - RNA, 23 nt, synthetic construct
  source 1..23: mol_type = other RNA
ttaaaaattacctagaaataagg

SEQ ID NO: 1932 - RNA, 23 nt, synthetic construct
  source 1..23: mol_type = other RNA
taaaaattacctagaaataaggt

SEQ ID NO: 1933 - RNA, 23 nt, synthetic construct
  source 1..23: mol_type = other RNA
aaaaattacctagaaataaggtt

SEQ ID NO: 1934 - RNA, 23 nt, synthetic construct
  source 1..23: mol_type = other RNA
aaaattacctagaaataaggttt

SEQ ID NO: 1935 - RNA, 23 nt, synthetic construct
  source 1..23: mol_type = other RNA
aaattacctagaaataaggtttc

SEQ ID NO: 1936 - RNA, 23 nt, synthetic construct
  source 1..23: mol_type = other RNA
aattacctagaaataaggtttct

SEQ ID NO: 1937 - RNA, 23 nt, synthetic construct
  source 1..23: mol_type = other RNA
attacctagaaataaggtttctt

SEQ ID NO: 1938 - RNA, 23 nt, synthetic construct
  source 1..23: mol_type = other RNA
ttacctagaaataaggtttcttt

SEQ ID NO: 1939 - RNA, 23 nt, synthetic construct
  source 1..23: mol_type = other RNA
tacctagaaataaggtttcttta

SEQ ID NO: 1940 - RNA, 23 nt, synthetic construct
  source 1..23: mol_type = other RNA
acctagaaataaggtttctttaa

SEQ ID NO: 1941 - RNA, 23 nt, synthetic construct
  source 1..23: mol_type = other RNA
cctagaaataaggtttctttaat

SEQ ID NO: 1942 - RNA, 23 nt, synthetic construct
  source 1..23: mol_type = other RNA
ctagaaataaggtttctttaatt

SEQ ID NO: 1943 - RNA, 23 nt, synthetic construct
  source 1..23: mol_type = other RNA
tagaaataaggtttctttaattg

SEQ ID NO: 1944 - RNA, 23 nt, synthetic construct
  source 1..23: mol_type = other RNA
agaaataaggtttctttaattgc

SEQ ID NO: 1945 - RNA, 23 nt, synthetic construct
  source 1..23: mol_type = other RNA
gaaataaggtttctttaattgct

SEQ ID NO: 1946 - RNA, 23 nt, synthetic construct
  source 1..23: mol_type = other RNA
aaataaggtttctttaattgctg

SEQ ID NO: 1947 - RNA, 23 nt, synthetic construct
  source 1..23: mol_type = other RNA
aataaggtttctttaattgctgg

SEQ ID NO: 1948 - RNA, 23 nt, synthetic construct
  source 1..23: mol_type = other RNA
ataaggtttctttaattgctggt

SEQ ID NO: 1949 - RNA, 23 nt, synthetic construct
  source 1..23: mol_type = other RNA
taaggtttctttaattgctggtt

SEQ ID NO: 1950 - RNA, 23 nt, synthetic construct
  source 1..23: mol_type = other RNA
aaggtttctttaattgctggtta

SEQ ID NO: 1951 - RNA, 23 nt, synthetic construct
  source 1..23: mol_type = other RNA
aggtttctttaattgctggttaa

SEQ ID NO: 1952 - RNA, 23 nt, synthetic construct
  source 1..23: mol_type = other RNA
ggtttctttaattgctggttaaa

SEQ ID NO: 1953 - RNA, 23 nt, synthetic construct
  source 1..23: mol_type = other RNA
gtttctttaattgctggttaaaa

SEQ ID NO: 1954 - RNA, 23 nt, synthetic construct
  source 1..23: mol_type = other RNA
tttctttaattgctggttaaaat

SEQ ID NO: 1955 - RNA, 23 nt, synthetic construct
  source 1..23: mol_type = other RNA
ttctttaattgctggttaaaatg

SEQ ID NO: 1956 - RNA, 23 nt, synthetic construct
  source 1..23: mol_type = other RNA
tctttaattgctggttaaaatgc

SEQ ID NO: 1957 - RNA, 23 nt, synthetic construct
  source 1..23: mol_type = other RNA
ctttaattgctggttaaaatgct

SEQ ID NO: 1958 - RNA, 23 nt, synthetic construct
  source 1..23: mol_type = other RNA
tttaattgctggttaaaatgctc

SEQ ID NO: 1959 - RNA, 23 nt, synthetic construct
  source 1..23: mol_type = other RNA
ttaattgctggttaaaatgctcc

SEQ ID NO: 1960 - RNA, 23 nt, synthetic construct
  source 1..23: mol_type = other RNA
taattgctggttaaaatgctccc

SEQ ID NO: 1961 - RNA, 23 nt, synthetic construct
  source 1..23: mol_type = other RNA
aattgctggttaaaatgctcccg

SEQ ID NO: 1962 - RNA, 23 nt, synthetic construct
  source 1..23: mol_type = other RNA
attgctggttaaaatgctcccgt

SEQ ID NO: 1963 - RNA, 23 nt, synthetic construct
  source 1..23: mol_type = other RNA
ttgctggttaaaatgctcccgtg

SEQ ID NO: 1964 - RNA, 23 nt, synthetic construct
  source 1..23: mol_type = other RNA
tgctggttaaaatgctcccgtgc

SEQ ID NO: 1965 - RNA, 23 nt, synthetic construct
  source 1..23: mol_type = other RNA
gctggttaaaatgctcccgtgca

SEQ ID NO: 1966 - RNA, 23 nt, synthetic construct
  source 1..23: mol_type = other RNA
ctggttaaaatgctcccgtgcag

SEQ ID NO: 1967 - RNA, 23 nt, synthetic construct
  source 1..23: mol_type = other RNA
tggttaaaatgctcccgtgcaga

SEQ ID NO: 1968 - RNA, 23 nt, synthetic construct
  source 1..23: mol_type = other RNA
ggttaaaatgctcccgtgcagaa

SEQ ID NO: 1969 - RNA, 23 nt, synthetic construct
  source 1..23: mol_type = other RNA
gttaaaatgctcccgtgcagaaa

SEQ ID NO: 1970 - RNA, 23 nt, synthetic construct
  source 1..23: mol_type = other RNA
ttaaaatgctcccgtgcagaaaa

SEQ ID NO: 1971 - RNA, 23 nt, synthetic construct
  source 1..23: mol_type = other RNA
taaaatgctcccgtgcagaaaac

SEQ ID NO: 1972 - RNA, 23 nt, synthetic construct
  source 1..23: mol_type = other RNA
aaaatgctcccgtgcagaaaaca

SEQ ID NO: 1973 - RNA, 23 nt, synthetic construct
  source 1..23: mol_type = other RNA
aaatgctcccgtgcagaaaacag

SEQ ID NO: 1974 - RNA, 23 nt, synthetic construct
  source 1..23: mol_type = other RNA
aatgctcccgtgcagaaaacagg

SEQ ID NO: 1975 - RNA, 23 nt, synthetic construct
  source 1..23: mol_type = other RNA
atgctcccgtgcagaaaacagga

SEQ ID NO: 1976 - RNA, 23 nt, synthetic construct
  source 1..23: mol_type = other RNA
tgctcccgtgcagaaaacaggaa

SEQ ID NO: 1977 - RNA, 23 nt, synthetic construct
  source 1..23: mol_type = other RNA
gctcccgtgcagaaaacaggaaa

SEQ ID NO: 1978 - RNA, 23 nt, synthetic construct
  source 1..23: mol_type = other RNA
ctcccgtgcagaaaacaggaaag

SEQ ID NO: 1979 - RNA, 23 nt, synthetic construct
  source 1..23: mol_type = other RNA
tcccgtgcagaaaacaggaaaga

SEQ ID NO: 1980 - RNA, 23 nt, synthetic construct
  source 1..23: mol_type = other RNA
cccgtgcagaaaacaggaaagaa

SEQ ID NO: 1981 - RNA, 23 nt, synthetic construct
  source 1..23: mol_type = other RNA
ccgtgcagaaaacaggaaagaac

SEQ ID NO: 1982 - RNA, 23 nt, synthetic construct
  source 1..23: mol_type = other RNA
cgtgcagaaaacaggaaagaacc

SEQ ID NO: 1983 - RNA, 23 nt, synthetic construct
  source 1..23: mol_type = other RNA
gtgcagaaaacaggaaagaacct

SEQ ID NO: 1984 - RNA, 23 nt, synthetic construct
  source 1..23: mol_type = other RNA
tgcagaaaacaggaaagaacctg

SEQ ID NO: 1985 - RNA, 23 nt, synthetic construct
  source 1..23: mol_type = other RNA
gcagaaaacaggaaagaacctgc

SEQ ID NO: 1986 - RNA, 23 nt, synthetic construct
  source 1..23: mol_type = other RNA
cagaaaacaggaaagaacctgcc

SEQ ID NO: 1987 - RNA, 23 nt, synthetic construct
  source 1..23: mol_type = other RNA
agaaaacaggaaagaacctgcct

SEQ ID NO: 1988 - RNA, 23 nt, synthetic construct
  source 1..23: mol_type = other RNA
gaaaacaggaaagaacctgcctg

SEQ ID NO: 1989 - RNA, 23 nt, synthetic construct
  source 1..23: mol_type = other RNA
aaaacaggaaagaacctgcctgg

SEQ ID NO: 1990 - RNA, 23 nt, synthetic construct
  source 1..23: mol_type = other RNA
aaacaggaaagaacctgcctggt

SEQ ID NO: 1991 - RNA, 23 nt, synthetic construct
  source 1..23: mol_type = other RNA
aacaggaaagaacctgcctggtt

SEQ ID NO: 1992 - RNA, 23 nt, synthetic construct
  source 1..23: mol_type = other RNA
acaggaaagaacctgcctggttc

SEQ ID NO: 1993 - RNA, 23 nt, synthetic construct
  source 1..23: mol_type = other RNA
caggaaagaacctgcctggttcc

SEQ ID NO: 1994 - RNA, 23 nt, synthetic construct
  source 1..23: mol_type = other RNA
aggaaagaacctgcctggttcct

SEQ ID NO: 1995 - RNA, 23 nt, synthetic construct
  source 1..23: mol_type = other RNA
ggaaagaacctgcctggttcctt

SEQ ID NO: 1996 - RNA, 23 nt, synthetic construct
  source 1..23: mol_type = other RNA
gaaagaacctgcctggttcctta

SEQ ID NO: 1997 - RNA, 23 nt, synthetic construct
  source 1..23: mol_type = other RNA
aaagaacctgcctggttccttag

SEQ ID NO: 1998 - RNA, 23 nt, synthetic construct
  source 1..23: mol_type = other RNA
aagaacctgcctggttccttagc

SEQ ID NO: 1999 - RNA, 23 nt, synthetic construct
  source 1..23: mol_type = other RNA
agaacctgcctggttccttagca

SEQ ID NO: 2000 - RNA, 23 nt, synthetic construct
  source 1..23: mol_type = other RNA
gaacctgcctggttccttagcaa

SEQ ID NO: 2001 - RNA, 23 nt, synthetic construct
  source 1..23: mol_type = other RNA
aacctgcctggttccttagcaaa

SEQ ID NO: 2002 - RNA, 23 nt, synthetic construct
  source 1..23: mol_type = other RNA
acctgcctggttccttagcaaat

SEQ ID NO: 2003 - RNA, 23 nt, synthetic construct
  source 1..23: mol_type = other RNA
cctgcctggttccttagcaaatc

SEQ ID NO: 2004 - RNA, 23 nt, synthetic construct
  source 1..23: mol_type = other RNA
ctgcctggttccttagcaaatct

SEQ ID NO: 2005 - RNA, 23 nt, synthetic construct
  source 1..23: mol_type = other RNA
tgcctggttccttagcaaatctg

SEQ ID NO: 2006 - RNA, 23 nt, synthetic construct
  source 1..23: mol_type = other RNA
gcctggttccttagcaaatctga

SEQ ID NO: 2007 - RNA, 23 nt, synthetic construct
  source 1..23: mol_type = other RNA
cctggttccttagcaaatctgag

SEQ ID NO: 2008 - RNA, 23 nt, synthetic construct
  source 1..23: mol_type = other RNA
ctggttccttagcaaatctgagt

SEQ ID NO: 2009 - RNA, 23 nt, synthetic construct
  source 1..23: mol_type = other RNA
tggttccttagcaaatctgagtt

SEQ ID NO: 2010 - RNA, 23 nt, synthetic construct
  source 1..23: mol_type = other RNA
ggttccttagcaaatctgagttc

SEQ ID NO: 2011 - RNA, 23 nt, synthetic construct
  source 1..23: mol_type = other RNA
gttccttagcaaatctgagttcc

SEQ ID NO: 2012 - RNA, 23 nt, synthetic construct
  source 1..23: mol_type = other RNA
ttccttagcaaatctgagttcca

SEQ ID NO: 2013 - RNA, 23 nt, synthetic construct
  source 1..23: mol_type = other RNA
tccttagcaaatctgagttccag

SEQ ID NO: 2014 - RNA, 23 nt, synthetic construct
  source 1..23: mol_type = other RNA
ccttagcaaatctgagttccagt

SEQ ID NO: 2015 - RNA, 23 nt, synthetic construct
  source 1..23: mol_type = other RNA
cttagcaaatctgagttccagtc

SEQ ID NO: 2016 - RNA, 23 nt, synthetic construct
  source 1..23: mol_type = other RNA
ttagcaaatctgagttccagtcc

SEQ ID NO: 2017 - RNA, 23 nt, synthetic construct
  source 1..23: mol_type = other RNA
tagcaaatctgagttccagtccc

SEQ ID NO: 2018 - RNA, 23 nt, synthetic construct
  source 1..23: mol_type = other RNA
agcaaatctgagttccagtccca

SEQ ID NO: 2019 - RNA, 23 nt, synthetic construct
  source 1..23: mol_type = other RNA
gcaaatctgagttccagtcccag

SEQ ID NO: 2020 - RNA, 23 nt, synthetic construct
  source 1..23: mol_type = other RNA
caaatctgagttccagtcccagg

SEQ ID NO: 2021 - RNA, 23 nt, synthetic construct
  source 1..23: mol_type = other RNA
aaatctgagttccagtcccaggt

SEQ ID NO: 2022 - RNA, 23 nt, synthetic construct
  source 1..23: mol_type = other RNA
aatctgagttccagtcccaggtc

SEQ ID NO: 2023 - RNA, 23 nt, synthetic construct
  source 1..23: mol_type = other RNA
atctgagttccagtcccaggtcc

SEQ ID NO: 2024 - RNA, 23 nt, synthetic construct
  source 1..23: mol_type = other RNA
tctgagttccagtcccaggtcca

SEQ ID NO: 2025 - RNA, 23 nt, synthetic construct
  source 1..23: mol_type = other RNA
tgagttccagtcccaggtccact

SEQ ID NO: 2026 - RNA, 23 nt, synthetic construct
  source 1..23: mol_type = other RNA
gagttccagtcccaggtccacta

SEQ ID NO: 2027 - RNA, 23 nt, synthetic construct
  source 1..23: mol_type = other RNA
agttccagtcccaggtccactac

SEQ ID NO: 2028 - RNA, 23 nt, synthetic construct
  source 1..23: mol_type = other RNA
gttccagtcccaggtccactact

SEQ ID NO: 2029 - RNA, 23 nt, synthetic construct
  source 1..23: mol_type = other RNA
ttccagtcccaggtccactacta

SEQ ID NO: 2030 - RNA, 23 nt, synthetic construct
  source 1..23: mol_type = other RNA
tccagtcccaggtccactactat

SEQ ID NO: 2031 - RNA, 23 nt, synthetic construct
  source 1..23: mol_type = other RNA
ccagtcccaggtccactactatt

SEQ ID NO: 2032 - RNA, 23 nt, synthetic construct
  source 1..23: mol_type = other RNA
cagtcccaggtccactactatta

SEQ ID NO: 2033 - RNA, 23 nt, synthetic construct
  source 1..23: mol_type = other RNA
agtcccaggtccactactattag

SEQ ID NO: 2034 - RNA, 23 nt, synthetic construct
  source 1..23: mol_type = other RNA
gtcccaggtccactactattagc

SEQ ID NO: 2035 - RNA, 23 nt, synthetic construct
  source 1..23: mol_type = other RNA
tcccaggtccactactattagct

SEQ ID NO: 2036 - RNA, 23 nt, synthetic construct
  source 1..23: mol_type = other RNA
cccaggtccactactattagctg

SEQ ID NO: 2037 - RNA, 23 nt, synthetic construct
  source 1..23: mol_type = other RNA
ccaggtccactactattagctga

SEQ ID NO: 2038 - RNA, 23 nt, synthetic construct
  source 1..23: mol_type = other RNA
caggtccactactattagctgag

SEQ ID NO: 2039 - RNA, 23 nt, synthetic construct
  source 1..23: mol_type = other RNA
aggtccactactattagctgagt

SEQ ID NO: 2040 - RNA, 23 nt, synthetic construct
  source 1..23: mol_type = other RNA
ggtccactactattagctgagtg

SEQ ID NO: 2041 - RNA, 23 nt, synthetic construct
  source 1..23: mol_type = other RNA
gtccactactattagctgagtga

SEQ ID NO: 2042 - RNA, 23 nt, synthetic construct
  source 1..23: mol_type = other RNA
tccactactattagctgagtgac

SEQ ID NO: 2043 - RNA, 23 nt, synthetic construct
  source 1..23: mol_type = other RNA
ccactactattagctgagtgacg

SEQ ID NO: 2044 - RNA, 23 nt, synthetic construct
  source 1..23: mol_type = other RNA
cactactattagctgagtgacgc

SEQ ID NO: 2045 - RNA, 23 nt, synthetic construct
  source 1..23: mol_type = other RNA
actactattagctgagtgacgct

SEQ ID NO: 2046 - RNA, 23 nt, synthetic construct
  source 1..23: mol_type = other RNA
ctactattagctgagtgacgctt

SEQ ID NO: 2047 - RNA, 23 nt, synthetic construct
  source 1..23: mol_type = other RNA
tactattagctgagtgacgcttc

SEQ ID NO: 2048 - RNA, 23 nt, synthetic construct
  source 1..23: mol_type = other RNA
actattagctgagtgacgcttcc

SEQ ID NO: 2049 - RNA, 23 nt, synthetic construct
  source 1..23: mol_type = other RNA
ctattagctgagtgacgcttcca

SEQ ID NO: 2050 - RNA, 23 nt, synthetic construct
  source 1..23: mol_type = other RNA
tattagctgagtgacgcttccag

SEQ ID NO: 2051 - RNA, 23 nt, synthetic construct
  source 1..23: mol_type = other RNA
attagctgagtgacgcttccagc

SEQ ID NO: 2052 - RNA, 23 nt, synthetic construct
  source 1..23: mol_type = other RNA
ttagctgagtgacgcttccagcc

SEQ ID NO: 2053 - RNA, 23 nt, synthetic construct
  source 1..23: mol_type = other RNA
tagctgagtgacgcttccagccc

SEQ ID NO: 2054 - RNA, 23 nt, synthetic construct
  source 1..23: mol_type = other RNA
agctgagtgacgcttccagcccg

SEQ ID NO: 2055 - RNA, 23 nt, synthetic construct
  source 1..23: mol_type = other RNA
gctgagtgacgcttccagcccgt

SEQ ID NO: 2056 - RNA, 23 nt, synthetic construct
  source 1..23: mol_type = other RNA
ctgagtgacgcttccagcccgtt

SEQ ID NO: 2057 - RNA, 23 nt, synthetic construct
  source 1..23: mol_type = other RNA
tgagtgacgcttccagcccgttt

SEQ ID NO: 2058 - RNA, 23 nt, synthetic construct
  source 1..23: mol_type = other RNA
gagtgacgcttccagcccgtttc

SEQ ID NO: 2059 - RNA, 23 nt, synthetic construct
  source 1..23: mol_type = other RNA
agtgacgcttccagcccgtttcc

SEQ ID NO: 2060 - RNA, 23 nt, synthetic construct
  source 1..23: mol_type = other RNA
gtgacgcttccagcccgtttccc

SEQ ID NO: 2061 - RNA, 23 nt, synthetic construct
  source 1..23: mol_type = other RNA
tgacgcttccagcccgtttcccc

SEQ ID NO: 2062 - RNA, 23 nt, synthetic construct
  source 1..23: mol_type = other RNA
gacgcttccagcccgtttccccc

SEQ ID NO: 2063 - RNA, 23 nt, synthetic construct
  source 1..23: mol_type = other RNA
acgcttccagcccgtttcccccg

SEQ ID NO: 2064 - RNA, 23 nt, synthetic construct
  source 1..23: mol_type = other RNA
cgcttccagcccgtttcccccgc

SEQ ID NO: 2065 - RNA, 23 nt, synthetic construct
  source 1..23: mol_type = other RNA
gcttccagcccgtttcccccgcc

SEQ ID NO: 2066 - RNA, 23 nt, synthetic construct
  source 1..23: mol_type = other RNA
cttccagcccgtttcccccgcct

SEQ ID NO: 2067 - RNA, 23 nt, synthetic construct
  source 1..23: mol_type = other RNA
ttccagcccgtttcccccgcctg

SEQ ID NO: 2068 - RNA, 23 nt, synthetic construct
  source 1..23: mol_type = other RNA
tccagcccgtttcccccgcctgg

SEQ ID NO: 2069 - RNA, 23 nt, synthetic construct
  source 1..23: mol_type = other RNA
ccagcccgtttcccccgcctgga

SEQ ID NO: 2070 - RNA, 23 nt, synthetic construct
  source 1..23: mol_type = other RNA
cagcccgtttcccccgcctggaa

SEQ ID NO: 2071 - RNA, 23 nt, synthetic construct
  source 1..23: mol_type = other RNA
agcccgtttcccccgcctggaaa

SEQ ID NO: 2072 - RNA, 23 nt, synthetic construct
  source 1..23: mol_type = other RNA
gcccgtttcccccgcctggaaac

SEQ ID NO: 2073 - RNA, 23 nt, synthetic construct
  source 1..23: mol_type = other RNA
cccgtttcccccgcctggaaact

SEQ ID NO: 2074 - RNA, 23 nt, synthetic construct
  source 1..23: mol_type = other RNA
ccgtttcccccgcctggaaactg

SEQ ID NO: 2075 - RNA, 23 nt, synthetic construct
  source 1..23: mol_type = other RNA
cgtttcccccgcctggaaactga

SEQ ID NO: 2076 - RNA, 23 nt, synthetic construct
  source 1..23: mol_type = other RNA
gtttcccccgcctggaaactgag

SEQ ID NO: 2077 - RNA, 23 nt, synthetic construct
  source 1..23: mol_type = other RNA
tttcccccgcctggaaactgagg

SEQ ID NO: 2078 - RNA, 23 nt, synthetic construct
  source 1..23: mol_type = other RNA
ttcccccgcctggaaactgagga

SEQ ID NO: 2079 - RNA, 23 nt, synthetic construct
  source 1..23: mol_type = other RNA
tcccccgcctggaaactgaggac

SEQ ID NO: 2080 - RNA, 23 nt, synthetic construct
  source 1..23: mol_type = other RNA
cccccgcctggaaactgaggacg

SEQ ID NO: 2081 - RNA, 23 nt, synthetic construct
  source 1..23: mol_type = other RNA
ccccgcctggaaactgaggacgg

SEQ ID NO: 2082 - RNA, 23 nt, synthetic construct
  source 1..23: mol_type = other RNA
cccgcctggaaactgaggacggc

SEQ ID NO: 2083 - RNA, 23 nt, synthetic construct
  source 1..23: mol_type = other RNA
ccgcctggaaactgaggacggca

SEQ ID NO: 2084 - RNA, 23 nt, synthetic construct
  source 1..23: mol_type = other RNA
cgcctggaaactgaggacggcaa

SEQ ID NO: 2085 - RNA, 23 nt, synthetic construct
  source 1..23: mol_type = other RNA
gcctggaaactgaggacggcaac

SEQ ID NO: 2086 - RNA, 23 nt, synthetic construct
  source 1..23: mol_type = other RNA
cctggaaactgaggacggcaacc

SEQ ID NO: 2087 - RNA, 23 nt, synthetic construct
  source 1..23: mol_type = other RNA
ctggaaactgaggacggcaaccc

SEQ ID NO: 2088 - RNA, 23 nt, synthetic construct
  source 1..23: mol_type = other RNA
tggaaactgaggacggcaacccc

SEQ ID NO: 2089 - RNA, 23 nt, synthetic construct
  source 1..23: mol_type = other RNA
ggaaactgaggacggcaaccccc

SEQ ID NO: 2090 - RNA, 23 nt, synthetic construct
  source 1..23: mol_type = other RNA
gaaactgaggacggcaaccccca

SEQ ID NO: 2091 - RNA, 23 nt, synthetic construct
  source 1..23: mol_type = other RNA
aaactgaggacggcaacccccac

SEQ ID NO: 2092 - RNA, 23 nt, synthetic construct
  source 1..23: mol_type = other RNA
aactgaggacggcaacccccacc

SEQ ID NO: 2093 - RNA, 23 nt, synthetic construct
  source 1..23: mol_type = other RNA
actgaggacggcaacccccaccc

SEQ ID NO: 2094 - RNA, 23 nt, synthetic construct
  source 1..23: mol_type = other RNA
ctgaggacggcaacccccaccct

SEQ ID NO: 2095 - RNA, 23 nt, synthetic construct
  source 1..23: mol_type = other RNA
tgaggacggcaacccccaccctc

SEQ ID NO: 2096 - RNA, 23 nt, synthetic construct
  source 1..23: mol_type = other RNA
gaggacggcaacccccaccctcg

SEQ ID NO: 2097 - RNA, 23 nt, synthetic construct
  source 1..23: mol_type = other RNA
aggacggcaacccccaccctcgc

SEQ ID NO: 2098 - RNA, 23 nt, synthetic construct
  source 1..23: mol_type = other RNA
ggacggcaacccccaccctcgca

SEQ ID NO: 2099 - RNA, 23 nt, synthetic construct
  source 1..23: mol_type = other RNA
gacggcaacccccaccctcgcag

SEQ ID NO: 2100 - RNA, 23 nt, synthetic construct
  source 1..23: mol_type = other RNA
acggcaacccccaccctcgcagg

SEQ ID NO: 2101 - RNA, 23 nt, synthetic construct
  source 1..23: mol_type = other RNA
cggcaacccccaccctcgcaggg

SEQ ID NO: 2102 - RNA, 23 nt, synthetic construct
  source 1..23: mol_type = other RNA
ggcaacccccaccctcgcagggc

SEQ ID NO: 2103 - RNA, 23 nt, synthetic construct
  source 1..23: mol_type = other RNA
gcaacccccaccctcgcagggcc

SEQ ID NO: 2104 - RNA, 23 nt, synthetic construct
  source 1..23: mol_type = other RNA
caacccccaccctcgcagggccg

SEQ ID NO: 2105 - RNA, 23 nt, synthetic construct
  source 1..23: mol_type = other RNA
aacccccaccctcgcagggccgg

SEQ ID NO: 2106 - RNA, 23 nt, synthetic construct
  source 1..23: mol_type = other RNA
acccccaccctcgcagggccggt

SEQ ID NO: 2107 - RNA, 23 nt, synthetic construct
  source 1..23: mol_type = other RNA
cccccaccctcgcagggccggtg

SEQ ID NO: 2108 - RNA, 23 nt, synthetic construct
  source 1..23: mol_type = other RNA
ccccaccctcgcagggccggtgg

SEQ ID NO: 2109 - RNA, 23 nt, synthetic construct
  source 1..23: mol_type = other RNA
cccaccctcgcagggccggtggg

SEQ ID NO: 2110 - RNA, 23 nt, synthetic construct
  source 1..23: mol_type = other RNA
ccaccctcgcagggccggtggga

SEQ ID NO: 2111 - RNA, 23 nt, synthetic construct
  source 1..23: mol_type = other RNA
caccctcgcagggccggtgggaa

SEQ ID NO: 2112 - RNA, 23 nt, synthetic construct
  source 1..23: mol_type = other RNA
accctcgcagggccggtgggaag

SEQ ID NO: 2113 - RNA, 23 nt, synthetic construct
  source 1..23: mol_type = other RNA
ccctcgcagggccggtgggaaga

SEQ ID NO: 2114 - RNA, 23 nt, synthetic construct
  source 1..23: mol_type = other RNA
cctcgcagggccggtgggaagac

SEQ ID NO: 2115 - RNA, 23 nt, synthetic construct
  source 1..23: mol_type = other RNA
ctcgcagggccggtgggaagaca

SEQ ID NO: 2116 - RNA, 23 nt, synthetic construct
  source 1..23: mol_type = other RNA
tcgcagggccggtgggaagacac

SEQ ID NO: 2117 - RNA, 23 nt, synthetic construct
  source 1..23: mol_type = other RNA
cgcagggccggtgggaagacaca

SEQ ID NO: 2118 - RNA, 23 nt, synthetic construct
  source 1..23: mol_type = other RNA
gcagggccggtgggaagacacaa

SEQ ID NO: 2119 - RNA, 23 nt, synthetic construct
  source 1..23: mol_type = other RNA
cagggccggtgggaagacacaaa

SEQ ID NO: 2120 - RNA, 23 nt, synthetic construct
  source 1..23: mol_type = other RNA
agggccggtgggaagacacaaag

SEQ ID NO: 2121 - RNA, 23 nt, synthetic construct
  source 1..23: mol_type = other RNA
gggccggtgggaagacacaaagt

SEQ ID NO: 2122 - RNA, 23 nt, synthetic construct
  source 1..23: mol_type = other RNA
ggccggtgggaagacacaaagtg

SEQ ID NO: 2123 - RNA, 23 nt, synthetic construct
  source 1..23: mol_type = other RNA
gccggtgggaagacacaaagtga

SEQ ID NO: 2124 - RNA, 23 nt, synthetic construct
  source 1..23: mol_type = other RNA
ccggtgggaagacacaaagtgat

SEQ ID NO: 2125 - RNA, 23 nt, synthetic construct
  source 1..23: mol_type = other RNA
cggtgggaagacacaaagtgatg

SEQ ID NO: 2126 - RNA, 23 nt, synthetic construct
  source 1..23: mol_type = other RNA
ggtgggaagacacaaagtgatgt

SEQ ID NO: 2127 - RNA, 23 nt, synthetic construct
  source 1..23: mol_type = other RNA
gtgggaagacacaaagtgatgtg

SEQ ID NO: 2128 - RNA, 23 nt, synthetic construct
  source 1..23: mol_type = other RNA
tgggaagacacaaagtgatgtgg

SEQ ID NO: 2129 - RNA, 23 nt, synthetic construct
  source 1..23: mol_type = other RNA
gggaagacacaaagtgatgtggg

SEQ ID NO: 2130 - RNA, 23 nt, synthetic construct
  source 1..23: mol_type = other RNA
ggaagacacaaagtgatgtgggc

SEQ ID NO: 2131 - RNA, 23 nt, synthetic construct
  source 1..23: mol_type = other RNA
gaagacacaaagtgatgtgggca

SEQ ID NO: 2132 - RNA, 23 nt, synthetic construct
  source 1..23: mol_type = other RNA
aagacacaaagtgatgtgggcaa

SEQ ID NO: 2133 - RNA, 23 nt, synthetic construct
  source 1..23: mol_type = other RNA
agacacaaagtgatgtgggcaag

SEQ ID NO: 2134 - RNA, 23 nt, synthetic construct
  source 1..23: mol_type = other RNA
gacacaaagtgatgtgggcaagt

SEQ ID NO: 2135 - RNA, 23 nt, synthetic construct
  source 1..23: mol_type = other RNA
acacaaagtgatgtgggcaagtg

SEQ ID NO: 2136 - RNA, 23 nt, synthetic construct
  source 1..23: mol_type = other RNA
cacaaagtgatgtgggcaagtgc

SEQ ID NO: 2137 - RNA, 23 nt, synthetic construct
  source 1..23: mol_type = other RNA
acaaagtgatgtgggcaagtgcc

SEQ ID NO: 2138 - RNA, 23 nt, synthetic construct
  source 1..23: mol_type = other RNA
caaagtgatgtgggcaagtgcca

SEQ ID NO: 2139 - RNA, 23 nt, synthetic construct
  source 1..23: mol_type = other RNA
aaagtgatgtgggcaagtgccag

SEQ ID NO: 2140 - RNA, 23 nt, synthetic construct
  source 1..23: mol_type = other RNA
aagtgatgtgggcaagtgccagg

SEQ ID NO: 2141 - RNA, 23 nt, synthetic construct
  source 1..23: mol_type = other RNA
agtgatgtgggcaagtgccaggc

SEQ ID NO: 2142 - RNA, 23 nt, synthetic construct
  source 1..23: mol_type = other RNA
gtgatgtgggcaagtgccaggcc

SEQ ID NO: 2143 - RNA, 23 nt, synthetic construct
  source 1..23: mol_type = other RNA
tgatgtgggcaagtgccaggccc

SEQ ID NO: 2144 - RNA, 23 nt, synthetic construct
  source 1..23: mol_type = other RNA
gatgtgggcaagtgccaggccca

SEQ ID NO: 2145 - RNA, 23 nt, synthetic construct
  source 1..23: mol_type = other RNA
atgtgggcaagtgccaggcccac

SEQ ID NO: 2146 - RNA, 23 nt, synthetic construct
  source 1..23: mol_type = other RNA
tgtgggcaagtgccaggcccaca

SEQ ID NO: 2147 - RNA, 23 nt, synthetic construct
  source 1..23: mol_type = other RNA
gtgggcaagtgccaggcccacat

SEQ ID NO: 2148 - RNA, 23 nt, synthetic construct
  source 1..23: mol_type = other RNA
tgggcaagtgccaggcccacatg

SEQ ID NO: 2149 - RNA, 23 nt, synthetic construct
  source 1..23: mol_type = other RNA
gggcaagtgccaggcccacatgg

SEQ ID NO: 2150 - RNA, 23 nt, synthetic construct
  source 1..23: mol_type = other RNA
ggcaagtgccaggcccacatggt

SEQ ID NO: 2151 - RNA, 23 nt, synthetic construct
  source 1..23: mol_type = other RNA
gcaagtgccaggcccacatggta

SEQ ID NO: 2152 - RNA, 23 nt, synthetic construct
  source 1..23: mol_type = other RNA
caagtgccaggcccacatggtaa

SEQ ID NO: 2153 - RNA, 23 nt, synthetic construct
  source 1..23: mol_type = other RNA
aagtgccaggcccacatggtaag

SEQ ID NO: 2154 - RNA, 23 nt, synthetic construct
  source 1..23: mol_type = other RNA
agtgccaggcccacatggtaagt

SEQ ID NO: 2155 - RNA, 23 nt, synthetic construct
  source 1..23: mol_type = other RNA
gtgccaggcccacatggtaagta

SEQ ID NO: 2156 - RNA, 23 nt, synthetic construct
  source 1..23: mol_type = other RNA
tgccaggcccacatggtaagtac

SEQ ID NO: 2157 - RNA, 23 nt, synthetic construct
  source 1..23: mol_type = other RNA
gccaggcccacatggtaagtacc

SEQ ID NO: 2158 - RNA, 23 nt, synthetic construct
  source 1..23: mol_type = other RNA
ccaggcccacatggtaagtaccc

SEQ ID NO: 2159 - RNA, 23 nt, synthetic construct
  source 1..23: mol_type = other RNA
caggcccacatggtaagtaccca

SEQ ID NO: 2160 - RNA, 23 nt, synthetic construct
  source 1..23: mol_type = other RNA
aggcccacatggtaagtacccaa

SEQ ID NO: 2161 - RNA, 23 nt, synthetic construct
  source 1..23: mol_type = other RNA
ggcccacatggtaagtacccaac

SEQ ID NO: 2162 - RNA, 23 nt, synthetic construct
  source 1..23: mol_type = other RNA
gcccacatggtaagtacccaact

SEQ ID NO: 2163 - RNA, 23 nt, synthetic construct
  source 1..23: mol_type = other RNA
cccacatggtaagtacccaacta

SEQ ID NO: 2164 - RNA, 23 nt, synthetic construct
  source 1..23: mol_type = other RNA
ccacatggtaagtacccaactaa

SEQ ID NO: 2165 - RNA, 23 nt, synthetic construct
  source 1..23: mol_type = other RNA
acatggtaagtacccaactaatc

SEQ ID NO: 2166 - RNA, 23 nt, synthetic construct
  source 1..23: mol_type = other RNA
catggtaagtacccaactaatct

SEQ ID NO: 2167 - RNA, 23 nt, synthetic construct
  source 1..23: mol_type = other RNA
atggtaagtacccaactaatctc

SEQ ID NO: 2168 - RNA, 23 nt, synthetic construct
  source 1..23: mol_type = other RNA
tggtaagtacccaactaatctcg

SEQ ID NO: 2169 - RNA, 23 nt, synthetic construct
  source 1..23: mol_type = other RNA
ggtaagtacccaactaatctcgc

SEQ ID NO: 2170 - RNA, 23 nt, synthetic construct
  source 1..23: mol_type = other RNA
gtaagtacccaactaatctcgcc

SEQ ID NO: 2171 - RNA, 23 nt, synthetic construct
  source 1..23: mol_type = other RNA
taagtacccaactaatctcgccc

SEQ ID NO: 2172 - RNA, 23 nt, synthetic construct
  source 1..23: mol_type = other RNA
aagtacccaactaatctcgcccc

SEQ ID NO: 2173 - RNA, 23 nt, synthetic construct
  source 1..23: mol_type = other RNA
agtacccaactaatctcgcccct

SEQ ID NO: 2174 - RNA, 23 nt, synthetic construct
  source 1..23: mol_type = other RNA
gtacccaactaatctcgcccctc

SEQ ID NO: 2175 - RNA, 23 nt, synthetic construct
  source 1..23: mol_type = other RNA
tacccaactaatctcgcccctct

SEQ ID NO: 2176 - RNA, 23 nt, synthetic construct
  source 1..23: mol_type = other RNA
acccaactaatctcgcccctctc

SEQ ID NO: 2177 - RNA, 23 nt, synthetic construct
  source 1..23: mol_type = other RNA
cccaactaatctcgcccctctca

SEQ ID NO: 2178 - RNA, 23 nt, synthetic construct
  source 1..23: mol_type = other RNA
ccaactaatctcgcccctctcag

SEQ ID NO: 2179 - RNA, 23 nt, synthetic construct
  source 1..23: mol_type = other RNA
caactaatctcgcccctctcagg

SEQ ID NO: 2180 - RNA, 23 nt, synthetic construct
  source 1..23: mol_type = other RNA
aactaatctcgcccctctcagga

SEQ ID NO: 2181 - RNA, 23 nt, synthetic construct
  source 1..23: mol_type = other RNA
actaatctcgcccctctcaggac

SEQ ID NO: 2182 - RNA, 23 nt, synthetic construct
  source 1..23: mol_type = other RNA
ctaatctcgcccctctcaggacc

SEQ ID NO: 2183 - RNA, 23 nt, synthetic construct
  source 1..23: mol_type = other RNA
taatctcgcccctctcaggacct

SEQ ID NO: 2184 - RNA, 23 nt, synthetic construct
  source 1..23: mol_type = other RNA
aatctcgcccctctcaggaccta

SEQ ID NO: 2185 - RNA, 23 nt, synthetic construct
  source 1..23: mol_type = other RNA
atctcgcccctctcaggacctac

SEQ ID NO: 2186 - RNA, 24 nt, synthetic construct
  source 1..24: mol_type = other RNA
tcttttaaaaattacctagaaata

SEQ ID NO: 2187 - RNA, 24 nt, synthetic construct
  source 1..24: mol_type = other RNA
ttttaaaaattacctagaaataag

SEQ ID NO: 2188 - RNA, 24 nt, synthetic construct
  source 1..24: mol_type = other RNA
tttaaaaattacctagaaataagg

SEQ ID NO: 2189 - RNA, 24 nt, synthetic construct
  source 1..24: mol_type = other RNA
ttaaaaattacctagaaataaggt

SEQ ID NO: 2190 - RNA, 24 nt, synthetic construct
  source 1..24: mol_type = other RNA
taaaaattacctagaaataaggtt

SEQ ID NO: 2191 - RNA, 24 nt, synthetic construct
  source 1..24: mol_type = other RNA
aaaaattacctagaaataaggttt

SEQ ID NO: 2192 - RNA, 24 nt, synthetic construct
  source 1..24: mol_type = other RNA
aaaattacctagaaataaggtttc

SEQ ID NO: 2193 - RNA, 24 nt, synthetic construct
  source 1..24: mol_type = other RNA
aaattacctagaaataaggtttct

SEQ ID NO: 2194 - RNA, 24 nt, synthetic construct
  source 1..24: mol_type = other RNA
aattacctagaaataaggtttctt

SEQ ID NO: 2195 - RNA, 24 nt, synthetic construct
  source 1..24: mol_type = other RNA
attacctagaaataaggtttcttt

SEQ ID NO: 2196 - RNA, 24 nt, synthetic construct
  source 1..24: mol_type = other RNA
ttacctagaaataaggtttcttta

SEQ ID NO: 2197 - RNA, 24 nt, synthetic construct
  source 1..24: mol_type = other RNA
tacctagaaataaggtttctttaa

SEQ ID NO: 2198 - RNA, 24 nt, synthetic construct
  source 1..24: mol_type = other RNA
acctagaaataaggtttctttaat

SEQ ID NO: 2199 - RNA, 24 nt, synthetic construct
  source 1..24: mol_type = other RNA
cctagaaataaggtttctttaatt

SEQ ID NO: 2200 - RNA, 24 nt, synthetic construct
  source 1..24: mol_type = other RNA
ctagaaataaggtttctttaattg

SEQ ID NO: 2201 - RNA, 24 nt, synthetic construct
  source 1..24: mol_type = other RNA
tagaaataaggtttctttaattgc

SEQ ID NO: 2202 - RNA, 24 nt, synthetic construct
  source 1..24: mol_type = other RNA
agaaataaggtttctttaattgct

SEQ ID NO: 2203 - RNA, 24 nt, synthetic construct
  source 1..24: mol_type = other RNA
gaaataaggtttctttaattgctg

SEQ ID NO: 2204 - RNA, 24 nt, synthetic construct
  source 1..24: mol_type = other RNA
aaataaggtttctttaattgctgg

SEQ ID NO: 2205 - RNA, 24 nt, synthetic construct
  source 1..24: mol_type = other RNA
aataaggtttctttaattgctggt

SEQ ID NO: 2206 - RNA, 24 nt, synthetic construct
  source 1..24: mol_type = other RNA
ataaggtttctttaattgctggtt

SEQ ID NO: 2207 - RNA, 24 nt, synthetic construct
  source 1..24: mol_type = other RNA
taaggtttctttaattgctggtta

SEQ ID NO: 2208 - RNA, 24 nt, synthetic construct
  source 1..24: mol_type = other RNA
aaggtttctttaattgctggttaa

SEQ ID NO: 2209 - RNA, 24 nt, synthetic construct
  source 1..24: mol_type = other RNA
aggtttctttaattgctggttaaa

SEQ ID NO: 2210 - RNA, 24 nt, synthetic construct
  source 1..24: mol_type = other RNA
ggtttctttaattgctggttaaaa

SEQ ID NO: 2211 - RNA, 24 nt, synthetic construct
  source 1..24: mol_type = other RNA
gtttctttaattgctggttaaaat

SEQ ID NO: 2212 - RNA, 24 nt, synthetic construct
  source 1..24: mol_type = other RNA
tttctttaattgctggttaaaatg

SEQ ID NO: 2213 - RNA, 24 nt, synthetic construct
  source 1..24: mol_type = other RNA
ttctttaattgctggttaaaatgc

SEQ ID NO: 2214 - RNA, 24 nt, synthetic construct
  source 1..24: mol_type = other RNA
tctttaattgctggttaaaatgct

SEQ ID NO: 2215 - RNA, 24 nt, synthetic construct
  source 1..24: mol_type = other RNA
ctttaattgctggttaaaatgctc

SEQ ID NO: 2216 - RNA, 24 nt, synthetic construct
  source 1..24: mol_type = other RNA
tttaattgctggttaaaatgctcc

SEQ ID NO: 2217 - RNA, 24 nt, synthetic construct
  source 1..24: mol_type = other RNA
ttaattgctggttaaaatgctccc

SEQ ID NO: 2218 - RNA, 24 nt, synthetic construct
  source 1..24: mol_type = other RNA
taattgctggttaaaatgctcccg

SEQ ID NO: 2219 - RNA, 24 nt, synthetic construct
  source 1..24: mol_type = other RNA
aattgctggttaaaatgctcccgt

SEQ ID NO: 2220 - RNA, 24 nt, synthetic construct
  source 1..24: mol_type = other RNA
attgctggttaaaatgctcccgtg

SEQ ID NO: 2221 - RNA, 24 nt, synthetic construct
  source 1..24: mol_type = other RNA
ttgctggttaaaatgctcccgtgc

SEQ ID NO: 2222 - RNA, 24 nt, synthetic construct
  source 1..24: mol_type = other RNA
tgctggttaaaatgctcccgtgca

SEQ ID NO: 2223 - RNA, 24 nt, synthetic construct
  source 1..24: mol_type = other RNA
gctggttaaaatgctcccgtgcag

SEQ ID NO: 2224 - RNA, 24 nt, synthetic construct
  source 1..24: mol_type = other RNA
ctggttaaaatgctcccgtgcaga

SEQ ID NO: 2225 - RNA, 24 nt, synthetic construct
  source 1..24: mol_type = other RNA
tggttaaaatgctcccgtgcagaa

SEQ ID NO: 2226 - RNA, 24 nt, synthetic construct
  source 1..24: mol_type = other RNA
ggttaaaatgctcccgtgcagaaa

SEQ ID NO: 2227 - RNA, 24 nt, synthetic construct
  source 1..24: mol_type = other RNA
gttaaaatgctcccgtgcagaaaa

SEQ ID NO: 2228 - RNA, 24 nt, synthetic construct
  source 1..24: mol_type = other RNA
ttaaaatgctcccgtgcagaaaac

SEQ ID NO: 2229 - RNA, 24 nt, synthetic construct
  source 1..24: mol_type = other RNA
taaaatgctcccgtgcagaaaaca

SEQ ID NO: 2230 - RNA, 24 nt, synthetic construct
  source 1..24: mol_type = other RNA
aaaatgctcccgtgcagaaaacag

SEQ ID NO: 2231 - RNA, 24 nt, synthetic construct
  source 1..24: mol_type = other RNA
aaatgctcccgtgcagaaaacagg

SEQ ID NO: 2232 - RNA, 24 nt, synthetic construct
  source 1..24: mol_type = other RNA
aatgctcccgtgcagaaaacagga

SEQ ID NO: 2233 - RNA, 24 nt, synthetic construct
  source 1..24: mol_type = other RNA
atgctcccgtgcagaaaacaggaa

SEQ ID NO: 2234 - RNA, 24 nt, synthetic construct
  source 1..24: mol_type = other RNA
tgctcccgtgcagaaaacaggaaa

SEQ ID NO: 2235 - RNA, 24 nt, synthetic construct
  source 1..24: mol_type = other RNA
gctcccgtgcagaaaacaggaaag

SEQ ID NO: 2236 - RNA, 24 nt, synthetic construct
  source 1..24: mol_type = other RNA
ctcccgtgcagaaaacaggaaaga

SEQ ID NO: 2237 - RNA, 24 nt, synthetic construct
  source 1..24: mol_type = other RNA
tcccgtgcagaaaacaggaaagaa

SEQ ID NO: 2238 - RNA, 24 nt, synthetic construct
  source 1..24: mol_type = other RNA
cccgtgcagaaaacaggaaagaac

SEQ ID NO: 2239 - RNA, 24 nt, synthetic construct
  source 1..24: mol_type = other RNA
ccgtgcagaaaacaggaaagaacc

SEQ ID NO: 2240 - RNA, 24 nt, synthetic construct
  source 1..24: mol_type = other RNA
cgtgcagaaaacaggaaagaacct

SEQ ID NO: 2241 - RNA, 24 nt, synthetic construct
  source 1..24: mol_type = other RNA
gtgcagaaaacaggaaagaacctg

SEQ ID NO: 2242 - RNA, 24 nt, synthetic construct
  source 1..24: mol_type = other RNA
tgcagaaaacaggaaagaacctgc

SEQ ID NO: 2243 - RNA, 24 nt, synthetic construct
  source 1..24: mol_type = other RNA
gcagaaaacaggaaagaacctgcc

SEQ ID NO: 2244 - RNA, 24 nt, synthetic construct
  source 1..24: mol_type = other RNA
cagaaaacaggaaagaacctgcct

SEQ ID NO: 2245 - RNA, 24 nt, synthetic construct
  source 1..24: mol_type = other RNA
agaaaacaggaaagaacctgcctg

SEQ ID NO: 2246 - RNA, 24 nt, synthetic construct
  source 1..24: mol_type = other RNA
gaaaacaggaaagaacctgcctgg

SEQ ID NO: 2247 - RNA, 24 nt, synthetic construct
  source 1..24: mol_type = other RNA
aaaacaggaaagaacctgcctggt

SEQ ID NO: 2248 - RNA, 24 nt, synthetic construct
  source 1..24: mol_type = other RNA
aaacaggaaagaacctgcctggtt

SEQ ID NO: 2249 - RNA, 24 nt, synthetic construct
  source 1..24: mol_type = other RNA
aacaggaaagaacctgcctggttc

SEQ ID NO: 2250 - RNA, 24 nt, synthetic construct
  source 1..24: mol_type = other RNA
acaggaaagaacctgcctggttcc

SEQ ID NO: 2251 - RNA, 24 nt, synthetic construct
  source 1..24: mol_type = other RNA
caggaaagaacctgcctggttcct

SEQ ID NO: 2252 - RNA, 24 nt, synthetic construct
  source 1..24: mol_type = other RNA
aggaaagaacctgcctggttcctt

SEQ ID NO: 2253 - RNA, 24 nt, synthetic construct
  source 1..24: mol_type = other RNA
ggaaagaacctgcctggttcctta

SEQ ID NO: 2254 - RNA, 24 nt, synthetic construct
  source 1..24: mol_type = other RNA
gaaagaacctgcctggttccttag

SEQ ID NO: 2255 - RNA, 24 nt, synthetic construct
  source 1..24: mol_type = other RNA
aaagaacctgcctggttccttagc

SEQ ID NO: 2256 - RNA, 24 nt, synthetic construct
  source 1..24: mol_type = other RNA
aagaacctgcctggttccttagca

SEQ ID NO: 2257 - RNA, 24 nt, synthetic construct
  source 1..24: mol_type = other RNA
agaacctgcctggttccttagcaa

SEQ ID NO: 2258 - RNA, 24 nt, synthetic construct
  source 1..24: mol_type = other RNA
gaacctgcctggttccttagcaaa

SEQ ID NO: 2259 - RNA, 24 nt, synthetic construct
  source 1..24: mol_type = other RNA
aacctgcctggttccttagcaaat

SEQ ID NO: 2260 - RNA, 24 nt, synthetic construct
  source 1..24: mol_type = other RNA
acctgcctggttccttagcaaatc

SEQ ID NO: 2261 - RNA, 24 nt, synthetic construct
  source 1..24: mol_type = other RNA
cctgcctggttccttagcaaatct

SEQ ID NO: 2262 - RNA, 24 nt, synthetic construct
  source 1..24: mol_type = other RNA
ctgcctggttccttagcaaatctg

SEQ ID NO: 2263 - RNA, 24 nt, synthetic construct
  source 1..24: mol_type = other RNA
tgcctggttccttagcaaatctga

SEQ ID NO: 2264 - RNA, 24 nt, synthetic construct
  source 1..24: mol_type = other RNA
gcctggttccttagcaaatctgag

SEQ ID NO: 2265 - RNA, 24 nt, synthetic construct
  source 1..24: mol_type = other RNA
cctggttccttagcaaatctgagt

SEQ ID NO: 2266 - RNA, 24 nt, synthetic construct
  source 1..24: mol_type = other RNA
ctggttccttagcaaatctgagtt

SEQ ID NO: 2267 - RNA, 24 nt, synthetic construct
  source 1..24: mol_type = other RNA
tggttccttagcaaatctgagttc

SEQ ID NO: 2268 - RNA, 24 nt, synthetic construct
  source 1..24: mol_type = other RNA
ggttccttagcaaatctgagttcc

SEQ ID NO: 2269 - RNA, 24 nt, synthetic construct
  source 1..24: mol_type = other RNA
gttccttagcaaatctgagttcca

SEQ ID NO: 2270 - RNA, 24 nt, synthetic construct
  source 1..24: mol_type = other RNA
ttccttagcaaatctgagttccag

SEQ ID NO: 2271 - RNA, 24 nt, synthetic construct
  source 1..24: mol_type = other RNA
tccttagcaaatctgagttccagt

SEQ ID NO: 2272 - RNA, 24 nt, synthetic construct
  source 1..24: mol_type = other RNA
ccttagcaaatctgagttccagtc

SEQ ID NO: 2273 - RNA, 24 nt, synthetic construct
  source 1..24: mol_type = other RNA
cttagcaaatctgagttccagtcc

SEQ ID NO: 2274 - RNA, 24 nt, synthetic construct
  source 1..24: mol_type = other RNA
ttagcaaatctgagttccagtccc

SEQ ID NO: 2275 - RNA, 24 nt, synthetic construct
  source 1..24: mol_type = other RNA
tagcaaatctgagttccagtccca

SEQ ID NO: 2276 - RNA, 24 nt, synthetic construct
  source 1..24: mol_type = other RNA
agcaaatctgagttccagtcccag

SEQ ID NO: 2277 - RNA, 24 nt, synthetic construct
  source 1..24: mol_type = other RNA
gcaaatctgagttccagtcccagg

SEQ ID NO: 2278 - RNA, 24 nt, synthetic construct
  source 1..24: mol_type = other RNA
caaatctgagttccagtcccaggt

SEQ ID NO: 2279 - RNA, 24 nt, synthetic construct
  source 1..24: mol_type = other RNA
aaatctgagttccagtcccaggtc

SEQ ID NO: 2280 - RNA, 24 nt, synthetic construct
  source 1..24: mol_type = other RNA
aatctgagttccagtcccaggtcc

SEQ ID NO: 2281 - RNA, 24 nt, synthetic construct
  source 1..24: mol_type = other RNA
atctgagttccagtcccaggtcca

SEQ ID NO: 2282 - RNA, 24 nt, synthetic construct
  source 1..24: mol_type = other RNA
tctgagttccagtcccaggtccac

SEQ ID NO: 2283 - RNA, 24 nt, synthetic construct
  source 1..24: mol_type = other RNA
ctgagttccagtcccaggtccact

SEQ ID NO: 2284 - RNA, 24 nt, synthetic construct
  source 1..24: mol_type = other RNA
tgagttccagtcccaggtccacta

SEQ ID NO: 2285 - RNA, 24 nt, synthetic construct
  source 1..24: mol_type = other RNA
gagttccagtcccaggtccactac

SEQ ID NO: 2286 - RNA, 24 nt, synthetic construct
  source 1..24: mol_type = other RNA
agttccagtcccaggtccactact

SEQ ID NO: 2287 - RNA, 24 nt, synthetic construct
  source 1..24: mol_type = other RNA
gttccagtcccaggtccactacta

SEQ ID NO: 2288 - RNA, 24 nt, synthetic construct
  source 1..24: mol_type = other RNA
ttccagtcccaggtccactactat

SEQ ID NO: 2289 - RNA, 24 nt, synthetic construct
  source 1..24: mol_type = other RNA
tccagtcccaggtccactactatt

SEQ ID NO: 2290 - RNA, 24 nt, synthetic construct
  source 1..24: mol_type = other RNA
ccagtcccaggtccactactatta

SEQ ID NO: 2291 - RNA, 24 nt, synthetic construct
  source 1..24: mol_type = other RNA
cagtcccaggtccactactattag

SEQ ID NO: 2292 - RNA, 24 nt, synthetic construct
  source 1..24: mol_type = other RNA
agtcccaggtccactactattagc

SEQ ID NO: 2293 - RNA, 24 nt, synthetic construct
  source 1..24: mol_type = other RNA
gtcccaggtccactactattagct

SEQ ID NO: 2294 - RNA, 24 nt, synthetic construct
  source 1..24: mol_type = other RNA
tcccaggtccactactattagctg

SEQ ID NO: 2295 - RNA, 24 nt, synthetic construct
  source 1..24: mol_type = other RNA
cccaggtccactactattagctga

SEQ ID NO: 2296 - RNA, 24 nt, synthetic construct
  source 1..24: mol_type = other RNA
ccaggtccactactattagctgag

SEQ ID NO: 2297 - RNA, 24 nt, synthetic construct
  source 1..24: mol_type = other RNA
caggtccactactattagctgagt

SEQ ID NO: 2298 - RNA, 24 nt, synthetic construct
  source 1..24: mol_type = other RNA
aggtccactactattagctgagtg

SEQ ID NO: 2299 - RNA, 24 nt, synthetic construct
  source 1..24: mol_type = other RNA
ggtccactactattagctgagtga

SEQ ID NO: 2300 - RNA, 24 nt, synthetic construct
  source 1..24: mol_type = other RNA
gtccactactattagctgagtgac

SEQ ID NO: 2301 - RNA, 24 nt, synthetic construct
  source 1..24: mol_type = other RNA
tccactactattagctgagtgacg

SEQ ID NO: 2302 - RNA, 24 nt, synthetic construct
  source 1..24: mol_type = other RNA
ccactactattagctgagtgacgc

SEQ ID NO: 2303 - RNA, 24 nt, synthetic construct
  source 1..24: mol_type = other RNA
cactactattagctgagtgacgct

SEQ ID NO: 2304 - RNA, 24 nt, synthetic construct
  source 1..24: mol_type = other RNA
actactattagctgagtgacgctt

SEQ ID NO: 2305 - RNA, 24 nt, synthetic construct
  source 1..24: mol_type = other RNA
ctactattagctgagtgacgcttc

SEQ ID NO: 2306 - RNA, 24 nt, synthetic construct
  source 1..24: mol_type = other RNA
tactattagctgagtgacgcttcc

SEQ ID NO: 2307 - RNA, 24 nt, synthetic construct
  source 1..24: mol_type = other RNA
actattagctgagtgacgcttcca

SEQ ID NO: 2308 - RNA, 24 nt, synthetic construct
  source 1..24: mol_type = other RNA
ctattagctgagtgacgcttccag

SEQ ID NO: 2309 - RNA, 24 nt, synthetic construct
  source 1..24: mol_type = other RNA
tattagctgagtgacgcttccagc

SEQ ID NO: 2310 - RNA, 24 nt, synthetic construct
  source 1..24: mol_type = other RNA
attagctgagtgacgcttccagcc

SEQ ID NO: 2311 - RNA, 24 nt, synthetic construct
  source 1..24: mol_type = other RNA
ttagctgagtgacgcttccagccc

SEQ ID NO: 2312 - RNA, 24 nt, synthetic construct
  source 1..24: mol_type = other RNA
tagctgagtgacgcttccagcccg

SEQ ID NO: 2313 - RNA, 24 nt, synthetic construct
  source 1..24: mol_type = other RNA
agctgagtgacgcttccagcccgt

SEQ ID NO: 2314 - RNA, 24 nt, synthetic construct
  source 1..24: mol_type = other RNA
gctgagtgacgcttccagcccgtt

SEQ ID NO: 2315 - RNA, 24 nt, synthetic construct
  source 1..24: mol_type = other RNA
ctgagtgacgcttccagcccgttt

SEQ ID NO: 2316 - RNA, 24 nt, synthetic construct
  source 1..24: mol_type = other RNA
tgagtgacgcttccagcccgtttc

SEQ ID NO: 2317 - RNA, 24 nt, synthetic construct
  source 1..24: mol_type = other RNA
gagtgacgcttccagcccgtttcc

SEQ ID NO: 2318 - RNA, 24 nt, synthetic construct
  source 1..24: mol_type = other RNA
agtgacgcttccagcccgtttccc

SEQ ID NO: 2319 - RNA, 24 nt, synthetic construct
  source 1..24: mol_type = other RNA
gtgacgcttccagcccgtttcccc

SEQ ID NO: 2320 - RNA, 24 nt, synthetic construct
  source 1..24: mol_type = other RNA
tgacgcttccagcccgtttccccc

SEQ ID NO: 2321 - RNA, 24 nt, synthetic construct
  source 1..24: mol_type = other RNA
gacgcttccagcccgtttcccccg

SEQ ID NO: 2322 - RNA, 24 nt, synthetic construct
  source 1..24: mol_type = other RNA
acgcttccagcccgtttcccccgc

SEQ ID NO: 2323 - RNA, 24 nt, synthetic construct
  source 1..24: mol_type = other RNA
cgcttccagcccgtttcccccgcc

SEQ ID NO: 2324 - RNA, 24 nt, synthetic construct
  source 1..24: mol_type = other RNA
gcttccagcccgtttcccccgcct

SEQ ID NO: 2325 - RNA, 24 nt, synthetic construct
  source 1..24: mol_type = other RNA
cttccagcccgtttcccccgcctg

SEQ ID NO: 2326 - RNA, 24 nt, synthetic construct
  source 1..24: mol_type = other RNA
ttccagcccgtttcccccgcctgg

SEQ ID NO: 2327 - RNA, 24 nt, synthetic construct
  source 1..24: mol_type = other RNA
tccagcccgtttcccccgcctgga

SEQ ID NO: 2328 - RNA, 24 nt, synthetic construct
  source 1..24: mol_type = other RNA
ccagcccgtttcccccgcctggaa

SEQ ID NO: 2329 - RNA, 24 nt, synthetic construct
  source 1..24: mol_type = other RNA
cagcccgtttcccccgcctggaaa

SEQ ID NO: 2330 - RNA, 24 nt, synthetic construct
  source 1..24: mol_type = other RNA
agcccgtttcccccgcctggaaac

SEQ ID NO: 2331 - RNA, 24 nt, synthetic construct
  source 1..24: mol_type = other RNA
gcccgtttcccccgcctggaaact

SEQ ID NO: 2332 - RNA, 24 nt, synthetic construct
  source 1..24: mol_type = other RNA
cccgtttcccccgcctggaaactg

SEQ ID NO: 2333 - RNA, 24 nt, synthetic construct
  source 1..24: mol_type = other RNA
ccgtttcccccgcctggaaactga

SEQ ID NO: 2334 - RNA, 24 nt, synthetic construct
  source 1..24: mol_type = other RNA
cgtttcccccgcctggaaactgag

SEQ ID NO: 2335 - RNA, 24 nt, synthetic construct
  source 1..24: mol_type = other RNA
gtttcccccgcctggaaactgagg

SEQ ID NO: 2336 - RNA, 24 nt, synthetic construct
  source 1..24: mol_type = other RNA
tttcccccgcctggaaactgagga

SEQ ID NO: 2337 - RNA, 24 nt, synthetic construct
  source 1..24: mol_type = other RNA
ttcccccgcctggaaactgaggac

SEQ ID NO: 2338 - RNA, 24 nt, synthetic construct
  source 1..24: mol_type = other RNA
tcccccgcctggaaactgaggacg

SEQ ID NO: 2339 - RNA, 24 nt, synthetic construct
  source 1..24: mol_type = other RNA
cccccgcctggaaactgaggacgg

SEQ ID NO: 2340 - RNA, 24 nt, synthetic construct
  source 1..24: mol_type = other RNA
ccccgcctggaaactgaggacggc

SEQ ID NO: 2341 - RNA, 24 nt, synthetic construct
  source 1..24: mol_type = other RNA
cccgcctggaaactgaggacggca

SEQ ID NO: 2342 - RNA, 24 nt, synthetic construct
  source 1..24: mol_type = other RNA
ccgcctggaaactgaggacggcaa

SEQ ID NO: 2343 - RNA, 24 nt, synthetic construct
  source 1..24: mol_type = other RNA
cgcctggaaactgaggacggcaac

SEQ ID NO: 2344 - RNA, 24 nt, synthetic construct
  source 1..24: mol_type = other RNA
gcctggaaactgaggacggcaacc

SEQ ID NO: 2345 - RNA, 24 nt, synthetic construct
  source 1..24: mol_type = other RNA
cctggaaactgaggacggcaaccc

SEQ ID NO: 2346 - RNA, 24 nt, synthetic construct
  source 1..24: mol_type = other RNA
ctggaaactgaggacggcaacccc

SEQ ID NO: 2347 - RNA, 24 nt, synthetic construct
  source 1..24: mol_type = other RNA
tggaaactgaggacggcaaccccc

SEQ ID NO: 2348 - RNA, 24 nt, synthetic construct
  source 1..24: mol_type = other RNA
ggaaactgaggacggcaaccccca

SEQ ID NO: 2349 - RNA, 24 nt, synthetic construct
  source 1..24: mol_type = other RNA
gaaactgaggacggcaacccccac

SEQ ID NO: 2350 - RNA, 24 nt, synthetic construct
  source 1..24: mol_type = other RNA
aaactgaggacggcaacccccacc

SEQ ID NO: 2351 - RNA, 24 nt, synthetic construct
  source 1..24: mol_type = other RNA
aactgaggacggcaacccccaccc

SEQ ID NO: 2352 - RNA, 24 nt, synthetic construct
  source 1..24: mol_type = other RNA
actgaggacggcaacccccaccct

SEQ ID NO: 2353 - RNA, 24 nt, synthetic construct
  source 1..24: mol_type = other RNA
ctgaggacggcaacccccaccctc

SEQ ID NO: 2354 - RNA, 24 nt, synthetic construct
  source 1..24: mol_type = other RNA
tgaggacggcaacccccaccctcg

SEQ ID NO: 2355 - RNA, 24 nt, synthetic construct
  source 1..24: mol_type = other RNA
gaggacggcaacccccaccctcgc

SEQ ID NO: 2356 - RNA, 24 nt, synthetic construct
  source 1..24: mol_type = other RNA
aggacggcaacccccaccctcgca

SEQ ID NO: 2357 - RNA, 24 nt, synthetic construct
  source 1..24: mol_type = other RNA
ggacggcaacccccaccctcgcag

SEQ ID NO: 2358 - RNA, 24 nt, synthetic construct
  source 1..24: mol_type = other RNA
gacggcaacccccaccctcgcagg

SEQ ID NO: 2359 - RNA, 24 nt, synthetic construct
  source 1..24: mol_type = other RNA
acggcaacccccaccctcgcaggg

SEQ ID NO: 2360 - RNA, 24 nt, synthetic construct
  source 1..24: mol_type = other RNA
cggcaacccccaccctcgcagggc

SEQ ID NO: 2361 - RNA, 24 nt, synthetic construct
  source 1..24: mol_type = other RNA
ggcaacccccaccctcgcagggcc

SEQ ID NO: 2362 - RNA, 24 nt, synthetic construct
  source 1..24: mol_type = other RNA
gcaacccccaccctcgcagggccg

SEQ ID NO: 2363 - RNA, 24 nt, synthetic construct
  source 1..24: mol_type = other RNA
caacccccaccctcgcagggccgg

SEQ ID NO: 2364 - RNA, 24 nt, synthetic construct
  source 1..24: mol_type = other RNA
aacccccaccctcgcagggccggt

SEQ ID NO: 2365 - RNA, 24 nt, synthetic construct
  source 1..24: mol_type = other RNA
acccccaccctcgcagggccggtg

SEQ ID NO: 2366 - RNA, 24 nt, synthetic construct
  source 1..24: mol_type = other RNA
cccccaccctcgcagggccggtgg

SEQ ID NO: 2367 - RNA, 24 nt, synthetic construct
  source 1..24: mol_type = other RNA
ccccaccctcgcagggccggtggg

SEQ ID NO: 2368 - RNA, 24 nt, synthetic construct
  source 1..24: mol_type = other RNA
cccaccctcgcagggccggtggga

SEQ ID NO: 2369 - RNA, 24 nt, synthetic construct
  source 1..24: mol_type = other RNA
ccaccctcgcagggccggtgggaa

SEQ ID NO: 2370 - RNA, 24 nt, synthetic construct
  source 1..24: mol_type = other RNA
caccctcgcagggccggtgggaag

SEQ ID NO: 2371 - RNA, 24 nt, synthetic construct
  source 1..24: mol_type = other RNA
accctcgcagggccggtgggaaga

SEQ ID NO: 2372 - RNA, 24 nt, synthetic construct
  source 1..24: mol_type = other RNA
ccctcgcagggccggtgggaagac

SEQ ID NO: 2373 - RNA, 24 nt, synthetic construct
  source 1..24: mol_type = other RNA
cctcgcagggccggtgggaagaca

SEQ ID NO: 2374 - RNA, 24 nt, synthetic construct
  source 1..24: mol_type = other RNA
ctcgcagggccggtgggaagacac

SEQ ID NO: 2375 - RNA, 24 nt, synthetic construct
  source 1..24: mol_type = other RNA
tcgcagggccggtgggaagacaca

SEQ ID NO: 2376 - RNA, 24 nt, synthetic construct
  source 1..24: mol_type = other RNA
cgcagggccggtgggaagacacaa

SEQ ID NO: 2377 - RNA, 24 nt, synthetic construct
  source 1..24: mol_type = other RNA
gcagggccggtgggaagacacaaa

SEQ ID NO: 2378 - RNA, 24 nt, synthetic construct
  source 1..24: mol_type = other RNA
cagggccggtgggaagacacaaag

SEQ ID NO: 2379 - RNA, 24 nt, synthetic construct
  source 1..24: mol_type = other RNA
agggccggtgggaagacacaaagt

SEQ ID NO: 2380 - RNA, 24 nt, synthetic construct
  source 1..24: mol_type = other RNA
gggccggtgggaagacacaaagtg

SEQ ID NO: 2381 - RNA, 24 nt, synthetic construct
  source 1..24: mol_type = other RNA
ggccggtgggaagacacaaagtga

SEQ ID NO: 2382 - RNA, 24 nt, synthetic construct
  source 1..24: mol_type = other RNA
gccggtgggaagacacaaagtgat

SEQ ID NO: 2383 - RNA, 24 nt, synthetic construct
  source 1..24: mol_type = other RNA
ccggtgggaagacacaaagtgatg

SEQ ID NO: 2384 - RNA, 24 nt, synthetic construct
  source 1..24: mol_type = other RNA
cggtgggaagacacaaagtgatgt

SEQ ID NO: 2385 - RNA, 24 nt, synthetic construct
  source 1..24: mol_type = other RNA
ggtgggaagacacaaagtgatgtg

SEQ ID NO: 2386 - RNA, 24 nt, synthetic construct
  source 1..24: mol_type = other RNA
gtgggaagacacaaagtgatgtgg

SEQ ID NO: 2387 - RNA, 24 nt, synthetic construct
  source 1..24: mol_type = other RNA
tgggaagacacaaagtgatgtggg

SEQ ID NO: 2388 - RNA, 24 nt, synthetic construct
  source 1..24: mol_type = other RNA
gggaagacacaaagtgatgtgggc

SEQ ID NO: 2389 - RNA, 24 nt, synthetic construct
  source 1..24: mol_type = other RNA
ggaagacacaaagtgatgtgggca

SEQ ID NO: 2390 - RNA, 24 nt, synthetic construct
  source 1..24: mol_type = other RNA
gaagacacaaagtgatgtgggcaa

SEQ ID NO: 2391 - RNA, 24 nt, synthetic construct
  source 1..24: mol_type = other RNA
aagacacaaagtgatgtgggcaag

SEQ ID NO: 2392 - RNA, 24 nt, synthetic construct
  source 1..24: mol_type = other RNA
agacacaaagtgatgtgggcaagt

SEQ ID NO: 2393 - RNA, 24 nt, synthetic construct
  source 1..24: mol_type = other RNA
gacacaaagtgatgtgggcaagtg

SEQ ID NO: 2394 - RNA, 24 nt, synthetic construct
  source 1..24: mol_type = other RNA
acacaaagtgatgtgggcaagtgc

SEQ ID NO: 2395 - RNA, 24 nt, synthetic construct
  source 1..24: mol_type = other RNA
cacaaagtgatgtgggcaagtgcc

SEQ ID NO: 2396 - RNA, 24 nt, synthetic construct
  source 1..24: mol_type = other RNA
acaaagtgatgtgggcaagtgcca

SEQ ID NO: 2397 - RNA, 24 nt, synthetic construct
  source 1..24: mol_type = other RNA
caaagtgatgtgggcaagtgccag

SEQ ID NO: 2398 - RNA, 24 nt, synthetic construct
  source 1..24: mol_type = other RNA
aaagtgatgtgggcaagtgccagg

SEQ ID NO: 2399 - RNA, 24 nt, synthetic construct
  source 1..24: mol_type = other RNA
aagtgatgtgggcaagtgccaggc

SEQ ID NO: 2400 - RNA, 24 nt, synthetic construct
  source 1..24: mol_type = other RNA
agtgatgtgggcaagtgccaggcc

SEQ ID NO: 2401 - RNA, 24 nt, synthetic construct
  source 1..24: mol_type = other RNA
gtgatgtgggcaagtgccaggccc

SEQ ID NO: 2402 - RNA, 24 nt, synthetic construct
  source 1..24: mol_type = other RNA
tgatgtgggcaagtgccaggccca

SEQ ID NO: 2403 - RNA, 24 nt, synthetic construct
  source 1..24: mol_type = other RNA
gatgtgggcaagtgccaggcccac

SEQ ID NO: 2404 - RNA, 24 nt, synthetic construct
  source 1..24: mol_type = other RNA
atgtgggcaagtgccaggcccaca

SEQ ID NO: 2405 - RNA, 24 nt, synthetic construct
  source 1..24: mol_type = other RNA
tgtgggcaagtgccaggcccacat

SEQ ID NO: 2406 - RNA, 24 nt, synthetic construct
  source 1..24: mol_type = other RNA
gtgggcaagtgccaggcccacatg

SEQ ID NO: 2407 - RNA, 24 nt, synthetic construct
  source 1..24: mol_type = other RNA
tgggcaagtgccaggcccacatgg

SEQ ID NO: 2408 - RNA, 24 nt, synthetic construct
  source 1..24: mol_type = other RNA
gggcaagtgccaggcccacatggt

SEQ ID NO: 2409 - RNA, 24 nt, synthetic construct
  source 1..24: mol_type = other RNA
ggcaagtgccaggcccacatggta

SEQ ID NO: 2410 - RNA, 24 nt, synthetic construct
  source 1..24: mol_type = other RNA
gcaagtgccaggcccacatggtaa

SEQ ID NO: 2411 - RNA, 24 nt, synthetic construct
  source 1..24: mol_type = other RNA
caagtgccaggcccacatggtaag

SEQ ID NO: 2412 - RNA, 24 nt, synthetic construct
  source 1..24: mol_type = other RNA
aagtgccaggcccacatggtaagt

SEQ ID NO: 2413 - RNA, 24 nt, synthetic construct
  source 1..24: mol_type = other RNA
agtgccaggcccacatggtaagta

SEQ ID NO: 2414 - RNA, 24 nt, synthetic construct
  source 1..24: mol_type = other RNA
gtgccaggcccacatggtaagtac

SEQ ID NO: 2415 - RNA, 24 nt, synthetic construct
  source 1..24: mol_type = other RNA
tgccaggcccacatggtaagtacc

SEQ ID NO: 2416 - RNA, 24 nt, synthetic construct
  source 1..24: mol_type = other RNA
gccaggcccacatggtaagtaccc

SEQ ID NO: 2417 - RNA, 24 nt, synthetic construct
  source 1..24: mol_type = other RNA
ccaggcccacatggtaagtaccca

SEQ ID NO: 2418 - RNA, 24 nt, synthetic construct
  source 1..24: mol_type = other RNA
caggcccacatggtaagtacccaa

SEQ ID NO: 2419 - RNA, 24 nt, synthetic construct
  source 1..24: mol_type = other RNA
aggcccacatggtaagtacccaac

SEQ ID NO: 2420 - RNA, 24 nt, synthetic construct
  source 1..24: mol_type = other RNA
ggcccacatggtaagtacccaact

SEQ ID NO: 2421 - RNA, 24 nt, synthetic construct
  source 1..24: mol_type = other RNA
gcccacatggtaagtacccaacta

SEQ ID NO: 2422 - RNA, 24 nt, synthetic construct
  source 1..24: mol_type = other RNA
cccacatggtaagtacccaactaa

SEQ ID NO: 2423 - RNA, 24 nt, synthetic construct
  source 1..24: mol_type = other RNA
ccacatggtaagtacccaactaat

SEQ ID NO: 2424 - RNA, 24 nt, synthetic construct
  source 1..24: mol_type = other RNA
cacatggtaagtacccaactaatc

SEQ ID NO: 2425 - RNA, 24 nt, synthetic construct
  source 1..24: mol_type = other RNA
acatggtaagtacccaactaatct

SEQ ID NO: 2426 - RNA, 24 nt, synthetic construct
  source 1..24: mol_type = other RNA
catggtaagtacccaactaatctc

SEQ ID NO: 2427 - RNA, 24 nt, synthetic construct
  source 1..24: mol_type = other RNA
atggtaagtacccaactaatctcg

SEQ ID NO: 2428 - RNA, 24 nt, synthetic construct
  source 1..24: mol_type = other RNA
tggtaagtacccaactaatctcgc

SEQ ID NO: 2429 - RNA, 24 nt, synthetic construct
  source 1..24: mol_type = other RNA
ggtaagtacccaactaatctcgcc

SEQ ID NO: 2430 - RNA, 24 nt, synthetic construct
  source 1..24: mol_type = other RNA
gtaagtacccaactaatctcgccc

SEQ ID NO: 2431 - RNA, 24 nt, synthetic construct
  source 1..24: mol_type = other RNA
taagtacccaactaatctcgcccc

SEQ ID NO: 2432 - RNA, 24 nt, synthetic construct
  source 1..24: mol_type = other RNA
aagtacccaactaatctcgcccct

SEQ ID NO: 2433 - RNA, 24 nt, synthetic construct
  source 1..24: mol_type = other RNA
agtacccaactaatctcgcccctc

SEQ ID NO: 2434 - RNA, 24 nt, synthetic construct
  source 1..24: mol_type = other RNA
gtacccaactaatctcgcccctct

SEQ ID NO: 2435 - RNA, 24 nt, synthetic construct
  source 1..24: mol_type = other RNA
tacccaactaatctcgcccctctc

SEQ ID NO: 2436 - RNA, 24 nt, synthetic construct
  source 1..24: mol_type = other RNA
acccaactaatctcgcccctctca

SEQ ID NO: 2437 - RNA, 24 nt, synthetic construct
  source 1..24: mol_type = other RNA
cccaactaatctcgcccctctcag

SEQ ID NO: 2438 - RNA, 24 nt, synthetic construct
  source 1..24: mol_type = other RNA
ccaactaatctcgcccctctcagg

SEQ ID NO: 2439 - RNA, 24 nt, synthetic construct
  source 1..24: mol_type = other RNA
caactaatctcgcccctctcagga

SEQ ID NO: 2440 - RNA, 24 nt, synthetic construct
  source 1..24: mol_type = other RNA
aactaatctcgcccctctcaggac

SEQ ID NO: 2441 - RNA, 24 nt, synthetic construct
  source 1..24: mol_type = other RNA
actaatctcgcccctctcaggacc

SEQ ID NO: 2442 - RNA, 24 nt, synthetic construct
  source 1..24: mol_type = other RNA
ctaatctcgcccctctcaggacct

SEQ ID NO: 2443 - RNA, 24 nt, synthetic construct
  source 1..24: mol_type = other RNA
taatctcgcccctctcaggaccta

SEQ ID NO: 2444 - RNA, 24 nt, synthetic construct
  source 1..24: mol_type = other RNA
aatctcgcccctctcaggacctac

SEQ ID NO: 2445 - RNA, 25 nt, synthetic construct
  source 1..25: mol_type = other RNA
tcttttaaaaattacctagaaataa

SEQ ID NO: 2446 - RNA, 25 nt, synthetic construct
  source 1..25: mol_type = other RNA
cttttaaaaattacctagaaataag

SEQ ID NO: 2447 - RNA, 25 nt, synthetic construct
  source 1..25: mol_type = other RNA
ttttaaaaattacctagaaataagg

SEQ ID NO: 2448 - RNA, 25 nt, synthetic construct
  source 1..25: mol_type = other RNA
tttaaaaattacctagaaataaggt

SEQ ID NO: 2449 - RNA, 25 nt, synthetic construct
  source 1..25: mol_type = other RNA
ttaaaaattacctagaaataaggtt

SEQ ID NO: 2450 - RNA, 25 nt, synthetic construct
  source 1..25: mol_type = other RNA
taaaaattacctagaaataaggttt

SEQ ID NO: 2451 - RNA, 25 nt, synthetic construct
  source 1..25: mol_type = other RNA
aaaaattacctagaaataaggtttc

SEQ ID NO: 2452 - RNA, 25 nt, synthetic construct
  source 1..25: mol_type = other RNA
aaaattacctagaaataaggtttct

SEQ ID NO: 2453 - RNA, 25 nt, synthetic construct
  source 1..25: mol_type = other RNA
aaattacctagaaataaggtttctt

SEQ ID NO: 2454 - RNA, 25 nt, synthetic construct
  source 1..25: mol_type = other RNA
aattacctagaaataaggtttcttt

SEQ ID NO: 2455 - RNA, 25 nt, synthetic construct
  source 1..25: mol_type = other RNA
attacctagaaataaggtttcttta

SEQ ID NO: 2456 - RNA, 25 nt, synthetic construct
  source 1..25: mol_type = other RNA
ttacctagaaataaggtttctttaa

SEQ ID NO: 2457 - RNA, 25 nt, synthetic construct
  source 1..25: mol_type = other RNA
tacctagaaataaggtttctttaat

SEQ ID NO: 2458 - RNA, 25 nt, synthetic construct
  source 1..25: mol_type = other RNA
acctagaaataaggtttctttaatt

SEQ ID NO: 2459 - RNA, 25 nt, synthetic construct
  source 1..25: mol_type = other RNA
cctagaaataaggtttctttaattg

SEQ ID NO: 2460 - RNA, 25 nt, synthetic construct
  source 1..25: mol_type = other RNA
ctagaaataaggtttctttaattgc

SEQ ID NO: 2461 - RNA, 25 nt, synthetic construct
  source 1..25: mol_type = other RNA
tagaaataaggtttctttaattgct

SEQ ID NO: 2462 - RNA, 25 nt, synthetic construct
  source 1..25: mol_type = other RNA
agaaataaggtttctttaattgctg

SEQ ID NO: 2463 - RNA, 25 nt, synthetic construct
  source 1..25: mol_type = other RNA
gaaataaggtttctttaattgctgg

SEQ ID NO: 2464 - RNA, 25 nt, synthetic construct
  source 1..25: mol_type = other RNA
aaataaggtttctttaattgctggt

SEQ ID NO: 2465 - RNA, 25 nt, synthetic construct
  source 1..25: mol_type = other RNA
aataaggtttctttaattgctggtt

SEQ ID NO: 2466 - RNA, 25 nt, synthetic construct
  source 1..25: mol_type = other RNA
ataaggtttctttaattgctggtta

SEQ ID NO: 2467 - RNA, 25 nt, synthetic construct
  source 1..25: mol_type = other RNA
taaggtttctttaattgctggttaa

SEQ ID NO: 2468 - RNA, 25 nt, synthetic construct
  source 1..25: mol_type = other RNA
aaggtttctttaattgctggttaaa

SEQ ID NO: 2469 - RNA, 25 nt, synthetic construct
  source 1..25: mol_type = other RNA
aggtttctttaattgctggttaaaa

SEQ ID NO: 2470 - RNA, 25 nt, synthetic construct
  source 1..25: mol_type = other RNA
ggtttctttaattgctggttaaaat

SEQ ID NO: 2471 - RNA, 25 nt, synthetic construct
  source 1..25: mol_type = other RNA
gtttctttaattgctggttaaaatg

SEQ ID NO: 2472 - RNA, 25 nt, synthetic construct
  source 1..25: mol_type = other RNA
tttctttaattgctggttaaaatgc

SEQ ID NO: 2473 - RNA, 25 nt, synthetic construct
  source 1..25: mol_type = other RNA
ttctttaattgctggttaaaatgct

SEQ ID NO: 2474 - RNA, 25 nt, synthetic construct
  source 1..25: mol_type = other RNA
tctttaattgctggttaaaatgctc

SEQ ID NO: 2475 - RNA, 25 nt, synthetic construct
  source 1..25: mol_type = other RNA
ctttaattgctggttaaaatgctcc

SEQ ID NO: 2476 - RNA, 25 nt, synthetic construct
  source 1..25: mol_type = other RNA
tttaattgctggttaaaatgctccc

SEQ ID NO: 2477 - RNA, 25 nt, synthetic construct
  source 1..25: mol_type = other RNA
ttaattgctggttaaaatgctcccg

SEQ ID NO: 2478 - RNA, 25 nt, synthetic construct
  source 1..25: mol_type = other RNA
taattgctggttaaaatgctcccgt

SEQ ID NO: 2479 - RNA, 25 nt, synthetic construct
  source 1..25: mol_type = other RNA
aattgctggttaaaatgctcccgtg

SEQ ID NO: 2480 - RNA, 25 nt, synthetic construct
  source 1..25: mol_type = other RNA
attgctggttaaaatgctcccgtgc

SEQ ID NO: 2481 - RNA, 25 nt, synthetic construct
  source 1..25: mol_type = other RNA
ttgctggttaaaatgctcccgtgca

SEQ ID NO: 2482 - RNA, 25 nt, synthetic construct
  source 1..25: mol_type = other RNA
tgctggttaaaatgctcccgtgcag

SEQ ID NO: 2483 - RNA, 25 nt, synthetic construct
  source 1..25: mol_type = other RNA
gctggttaaaatgctcccgtgcaga

SEQ ID NO: 2484 - RNA, 25 nt, synthetic construct
  source 1..25: mol_type = other RNA
ctggttaaaatgctcccgtgcagaa

SEQ ID NO: 2485 - RNA, 25 nt, synthetic construct
  source 1..25: mol_type = other RNA
tggttaaaatgctcccgtgcagaaa

SEQ ID NO: 2486 - RNA, 25 nt, synthetic construct
  source 1..25: mol_type = other RNA
ggttaaaatgctcccgtgcagaaaa

SEQ ID NO: 2487 - RNA, 25 nt, synthetic construct
  source 1..25: mol_type = other RNA
gttaaaatgctcccgtgcagaaaac

SEQ ID NO: 2488 - RNA, 25 nt, synthetic construct
  source 1..25: mol_type = other RNA
ttaaaatgctcccgtgcagaaaaca

SEQ ID NO: 2489 - RNA, 25 nt, synthetic construct
  source 1..25: mol_type = other RNA
taaaatgctcccgtgcagaaaacag

SEQ ID NO: 2490 - RNA, 25 nt, synthetic construct
  source 1..25: mol_type = other RNA
aaaatgctcccgtgcagaaaacagg

SEQ ID NO: 2491 - RNA, 25 nt, synthetic construct
  source 1..25: mol_type = other RNA
aaatgctcccgtgcagaaaacagga

SEQ ID NO: 2492 - RNA, 25 nt, synthetic construct
  source 1..25: mol_type = other RNA
aatgctcccgtgcagaaaacaggaa

SEQ ID NO: 2493 - RNA, 25 nt, synthetic construct
  source 1..25: mol_type = other RNA
atgctcccgtgcagaaaacaggaaa

SEQ ID NO: 2494 - RNA, 25 nt, synthetic construct
  source 1..25: mol_type = other RNA
tgctcccgtgcagaaaacaggaaag

SEQ ID NO: 2495 - RNA, 25 nt, synthetic construct
  source 1..25: mol_type = other RNA
gctcccgtgcagaaaacaggaaaga

SEQ ID NO: 2496 - RNA, 25 nt, synthetic construct
  source 1..25: mol_type = other RNA
ctcccgtgcagaaaacaggaaagaa

SEQ ID NO: 2497 - RNA, 25 nt, synthetic construct
  source 1..25: mol_type = other RNA
tcccgtgcagaaaacaggaaagaac

SEQ ID NO: 2498 - RNA, 25 nt, synthetic construct
  source 1..25: mol_type = other RNA
cccgtgcagaaaacaggaaagaacc

SEQ ID NO: 2499 - RNA, 25 nt, synthetic construct
  source 1..25: mol_type = other RNA
ccgtgcagaaaacaggaaagaacct

SEQ ID NO: 2500 - RNA, 25 nt, synthetic construct
  source 1..25: mol_type = other RNA
cgtgcagaaaacaggaaagaacctg

SEQ ID NO: 2501 - RNA, 25 nt, synthetic construct
  source 1..25: mol_type = other RNA
gtgcagaaaacaggaaagaacctgc

SEQ ID NO: 2502 - RNA, 25 nt, synthetic construct
  source 1..25: mol_type = other RNA
tgcagaaaacaggaaagaacctgcc

SEQ ID NO: 2503 - RNA, 25 nt, synthetic construct
  source 1..25: mol_type = other RNA
gcagaaaacaggaaagaacctgcct

SEQ ID NO: 2504 - RNA, 25 nt, synthetic construct
  source 1..25: mol_type = other RNA
cagaaaacaggaaagaacctgcctg

SEQ ID NO: 2505 - RNA, 25 nt, synthetic construct
  source 1..25: mol_type = other RNA
agaaaacaggaaagaacctgcctgg

SEQ ID NO: 2506 - RNA, 25 nt, synthetic construct
  source 1..25: mol_type = other RNA
gaaaacaggaaagaacctgcctggt

SEQ ID NO: 2507 - RNA, 25 nt, synthetic construct
  source 1..25: mol_type = other RNA
aaaacaggaaagaacctgcctggtt

SEQ ID NO: 2508 - RNA, 25 nt, synthetic construct
  source 1..25: mol_type = other RNA
aaacaggaaagaacctgcctggttc

SEQ ID NO: 2509 - RNA, 25 nt, synthetic construct
  source 1..25: mol_type = other RNA
aacaggaaagaacctgcctggttcc

SEQ ID NO: 2510 - RNA, 25 nt, synthetic construct
  source 1..25: mol_type = other RNA
acaggaaagaacctgcctggttcct

SEQ ID NO: 2511 - RNA, 25 nt, synthetic construct
  source 1..25: mol_type = other RNA
caggaaagaacctgcctggttcctt

SEQ ID NO: 2512 - RNA, 25 nt, synthetic construct
  source 1..25: mol_type = other RNA
aggaaagaacctgcctggttcctta

SEQ ID NO: 2513 - RNA, 25 nt, synthetic construct
  source 1..25: mol_type = other RNA
ggaaagaacctgcctggttccttag

SEQ ID NO: 2514 - RNA, 25 nt, synthetic construct
  source 1..25: mol_type = other RNA
gaaagaacctgcctggttccttagc

SEQ ID NO: 2515 - RNA, 25 nt, synthetic construct
  source 1..25: mol_type = other RNA
aaagaacctgcctggttccttagca

SEQ ID NO: 2516 - RNA, 25 nt, synthetic construct
  source 1..25: mol_type = other RNA
aagaacctgcctggttccttagcaa

SEQ ID NO: 2517 - RNA, 25 nt, synthetic construct
  source 1..25: mol_type = other RNA
agaacctgcctggttccttagcaaa

SEQ ID NO: 2518 - RNA, 25 nt, synthetic construct
  source 1..25: mol_type = other RNA
gaacctgcctggttccttagcaaat

SEQ ID NO: 2519 - RNA, 25 nt, synthetic construct
  source 1..25: mol_type = other RNA
aacctgcctggttccttagcaaatc

SEQ ID NO: 2520 - RNA, 25 nt, synthetic construct
  source 1..25: mol_type = other RNA
acctgcctggttccttagcaaatct

SEQ ID NO: 2521 - RNA, 25 nt, synthetic construct
  source 1..25: mol_type = other RNA
cctgcctggttccttagcaaatctg

SEQ ID NO: 2522 - RNA, 25 nt, synthetic construct
  source 1..25: mol_type = other RNA
ctgcctggttccttagcaaatctga

SEQ ID NO: 2523 - RNA, 25 nt, synthetic construct
  source 1..25: mol_type = other RNA
tgcctggttccttagcaaatctgag

SEQ ID NO: 2524 - RNA, 25 nt, synthetic construct
  source 1..25: mol_type = other RNA
gcctggttccttagcaaatctgagt

SEQ ID NO: 2525 - RNA, 25 nt, synthetic construct
  source 1..25: mol_type = other RNA
cctggttccttagcaaatctgagtt

SEQ ID NO: 2526 - RNA, 25 nt, synthetic construct
  source 1..25: mol_type = other RNA
ctggttccttagcaaatctgagttc

SEQ ID NO: 2527 - RNA, 25 nt, synthetic construct
  source 1..25: mol_type = other RNA
tggttccttagcaaatctgagttcc

SEQ ID NO: 2528 - RNA, 25 nt, synthetic construct
  source 1..25: mol_type = other RNA
ggttccttagcaaatctgagttcca

SEQ ID NO: 2529 - RNA, 25 nt, synthetic construct
  source 1..25: mol_type = other RNA
gttccttagcaaatctgagttccag

SEQ ID NO: 2530 - RNA, 25 nt, synthetic construct
  source 1..25: mol_type = other RNA
ttccttagcaaatctgagttccagt

SEQ ID NO: 2531 - RNA, 25 nt, synthetic construct
  source 1..25: mol_type = other RNA
tccttagcaaatctgagttccagtc

SEQ ID NO: 2532 - RNA, 25 nt, synthetic construct
  source 1..25: mol_type = other RNA
ccttagcaaatctgagttccagtcc

SEQ ID NO: 2533 - RNA, 25 nt, synthetic construct
  source 1..25: mol_type = other RNA
cttagcaaatctgagttccagtccc

SEQ ID NO: 2534 - RNA, 25 nt, synthetic construct
  source 1..25: mol_type = other RNA
ttagcaaatctgagttccagtccca

SEQ ID NO: 2535 - RNA, 25 nt, synthetic construct
  source 1..25: mol_type = other RNA
tagcaaatctgagttccagtcccag

SEQ ID NO: 2536 - RNA, 25 nt, synthetic construct
  source 1..25: mol_type = other RNA
agcaaatctgagttccagtcccagg

SEQ ID NO: 2537 - RNA, 25 nt, synthetic construct
  source 1..25: mol_type = other RNA
gcaaatctgagttccagtcccaggt

SEQ ID NO: 2538 - RNA, 25 nt, synthetic construct
  source 1..25: mol_type = other RNA
caaatctgagttccagtcccaggtc

SEQ ID NO: 2539 - RNA, 25 nt, synthetic construct
  source 1..25: mol_type = other RNA
aaatctgagttccagtcccaggtcc

SEQ ID NO: 2540 - RNA, 25 nt, synthetic construct
  source 1..25: mol_type = other RNA
aatctgagttccagtcccaggtcca

SEQ ID NO: 2541 - RNA, 25 nt, synthetic construct
  source 1..25: mol_type = other RNA
atctgagttccagtcccaggtccac

SEQ ID NO: 2542 - RNA, 25 nt, synthetic construct
  source 1..25: mol_type = other RNA
tctgagttccagtcccaggtccact

SEQ ID NO: 2543 - RNA, 25 nt, synthetic construct
  source 1..25: mol_type = other RNA
ctgagttccagtcccaggtccacta

SEQ ID NO: 2544 - RNA, 25 nt, synthetic construct
  source 1..25: mol_type = other RNA
tgagttccagtcccaggtccactac

SEQ ID NO: 2545 - RNA, 25 nt, synthetic construct
  source 1..25: mol_type = other RNA
gagttccagtcccaggtccactact

SEQ ID NO: 2546 - RNA, 25 nt, synthetic construct
  source 1..25: mol_type = other RNA
agttccagtcccaggtccactacta

SEQ ID NO: 2547 - RNA, 25 nt, synthetic construct
  source 1..25: mol_type = other RNA
gttccagtcccaggtccactactat

SEQ ID NO: 2548 - RNA, 25 nt, synthetic construct
  source 1..25: mol_type = other RNA
ttccagtcccaggtccactactatt

SEQ ID NO: 2549 - RNA, 25 nt, synthetic construct
  source 1..25: mol_type = other RNA
tccagtcccaggtccactactatta

SEQ ID NO: 2550 - RNA, 25 nt, synthetic construct
  source 1..25: mol_type = other RNA
ccagtcccaggtccactactattag

SEQ ID NO: 2551 - RNA, 25 nt, synthetic construct
  source 1..25: mol_type = other RNA
cagtcccaggtccactactattagc

SEQ ID NO: 2552 - RNA, 25 nt, synthetic construct
  source 1..25: mol_type = other RNA
agtcccaggtccactactattagct

SEQ ID NO: 2553 - RNA, 25 nt, synthetic construct
  source 1..25: mol_type = other RNA
gtcccaggtccactactattagctg

SEQ ID NO: 2554 - RNA, 25 nt, synthetic construct
  source 1..25: mol_type = other RNA
tcccaggtccactactattagctga

SEQ ID NO: 2555 - RNA, 25 nt, synthetic construct
  source 1..25: mol_type = other RNA
cccaggtccactactattagctgag

SEQ ID NO: 2556 - RNA, 25 nt, synthetic construct
  source 1..25: mol_type = other RNA
ccaggtccactactattagctgagt

SEQ ID NO: 2557 - RNA, 25 nt, synthetic construct
  source 1..25: mol_type = other RNA
caggtccactactattagctgagtg

SEQ ID NO: 2558 - RNA, 25 nt, synthetic construct
  source 1..25: mol_type = other RNA
aggtccactactattagctgagtga

SEQ ID NO: 2559 - RNA, 25 nt, synthetic construct
  source 1..25: mol_type = other RNA
ggtccactactattagctgagtgac

SEQ ID NO: 2560 - RNA, 25 nt, synthetic construct
  source 1..25: mol_type = other RNA
gtccactactattagctgagtgacg

SEQ ID NO: 2561 - RNA, 25 nt, synthetic construct
  source 1..25: mol_type = other RNA
tccactactattagctgagtgacgc

SEQ ID NO: 2562 - RNA, 25 nt, synthetic construct
  source 1..25: mol_type = other RNA
ccactactattagctgagtgacgct

SEQ ID NO: 2563 - RNA, 25 nt, synthetic construct
  source 1..25: mol_type = other RNA
cactactattagctgagtgacgctt

SEQ ID NO: 2564 - RNA, 25 nt, synthetic construct
  source 1..25: mol_type = other RNA
actactattagctgagtgacgcttc

SEQ ID NO: 2565 - RNA, 25 nt, synthetic construct
  source 1..25: mol_type = other RNA
ctactattagctgagtgacgcttcc

SEQ ID NO: 2566 - RNA, 25 nt, synthetic construct
  source 1..25: mol_type = other RNA
tactattagctgagtgacgcttcca

SEQ ID NO: 2567 - RNA, 25 nt, synthetic construct
  source 1..25: mol_type = other RNA
actattagctgagtgacgcttccag

SEQ ID NO: 2568 - RNA, 25 nt, synthetic construct
  source 1..25: mol_type = other RNA
ctattagctgagtgacgcttccagc

SEQ ID NO: 2569 - RNA, 25 nt, synthetic construct
  source 1..25: mol_type = other RNA
tattagctgagtgacgcttccagcc

SEQ ID NO: 2570 - RNA, 25 nt, synthetic construct
  source 1..25: mol_type = other RNA
attagctgagtgacgcttccagccc

SEQ ID NO: 2571 - RNA, 25 nt, synthetic construct
  source 1..25: mol_type = other RNA
ttagctgagtgacgcttccagcccg

SEQ ID NO: 2572 - RNA, 25 nt, synthetic construct
  source 1..25: mol_type = other RNA
tagctgagtgacgcttccagcccgt

SEQ ID NO: 2573 - RNA, 25 nt, synthetic construct
  source 1..25: mol_type = other RNA
agctgagtgacgcttccagcccgtt

SEQ ID NO: 2574 - RNA, 25 nt, synthetic construct
  source 1..25: mol_type = other RNA
gctgagtgacgcttccagcccgttt

SEQ ID NO: 2575 - RNA, 25 nt, synthetic construct
  source 1..25: mol_type = other RNA
ctgagtgacgcttccagcccgtttc

SEQ ID NO: 2576 - RNA, 25 nt, synthetic construct
  source 1..25: mol_type = other RNA
tgagtgacgcttccagcccgtttcc

SEQ ID NO: 2577 - RNA, 25 nt, synthetic construct
  source 1..25: mol_type = other RNA
gagtgacgcttccagcccgtttccc

SEQ ID NO: 2578 - RNA, 25 nt, synthetic construct
  source 1..25: mol_type = other RNA
agtgacgcttccagcccgtttcccc

SEQ ID NO: 2579 - RNA, 25 nt, synthetic construct
  source 1..25: mol_type = other RNA
gtgacgcttccagcccgtttccccc

SEQ ID NO: 2580 - RNA, 25 nt, synthetic construct
  source 1..25: mol_type = other RNA
tgacgcttccagcccgtttcccccg

SEQ ID NO: 2581 - RNA, 25 nt, synthetic construct
  source 1..25: mol_type = other RNA
gacgcttccagcccgtttcccccgc

SEQ ID NO: 2582 - RNA, 25 nt, synthetic construct
  source 1..25: mol_type = other RNA
acgcttccagcccgtttcccccgcc

SEQ ID NO: 2583 - RNA, 25 nt, synthetic construct
  source 1..25: mol_type = other RNA
cgcttccagcccgtttcccccgcct

SEQ ID NO: 2584 - RNA, 25 nt, synthetic construct
  source 1..25: mol_type = other RNA
gcttccagcccgtttcccccgcctg

SEQ ID NO: 2585 - RNA, 25 nt, synthetic construct
  source 1..25: mol_type = other RNA
cttccagcccgtttcccccgcctgg

SEQ ID NO: 2586 - RNA, 25 nt, synthetic construct
  source 1..25: mol_type = other RNA
ttccagcccgtttcccccgcctgga

SEQ ID NO: 2587 - RNA, 25 nt, synthetic construct
  source 1..25: mol_type = other RNA
tccagcccgtttcccccgcctggaa

SEQ ID NO: 2588 - RNA, 25 nt, synthetic construct
  source 1..25: mol_type = other RNA
ccagcccgtttcccccgcctggaaa

SEQ ID NO: 2589 - RNA, 25 nt, synthetic construct
  source 1..25: mol_type = other RNA
cagcccgtttcccccgcctggaaac

SEQ ID NO: 2590 - RNA, 25 nt, synthetic construct
  source 1..25: mol_type = other RNA
agcccgtttcccccgcctggaaact

SEQ ID NO: 2591 - RNA, 25 nt, synthetic construct
  source 1..25: mol_type = other RNA
gcccgtttcccccgcctggaaactg

SEQ ID NO: 2592 - RNA, 25 nt, synthetic construct
  source 1..25: mol_type = other RNA
cccgtttcccccgcctggaaactga

SEQ ID NO: 2593 - RNA, 25 nt, synthetic construct
  source 1..25: mol_type = other RNA
ccgtttcccccgcctggaaactgag

SEQ ID NO: 2594 - RNA, 25 nt, synthetic construct
  source 1..25: mol_type = other RNA
cgtttcccccgcctggaaactgagg

SEQ ID NO: 2595 - RNA, 25 nt, synthetic construct
  source 1..25: mol_type = other RNA
gtttcccccgcctggaaactgagga

SEQ ID NO: 2596 - RNA, 25 nt, synthetic construct
  source 1..25: mol_type = other RNA
tttcccccgcctggaaactgaggac

SEQ ID NO: 2597 - RNA, 25 nt, synthetic construct
  source 1..25: mol_type = other RNA
ttcccccgcctggaaactgaggacg

SEQ ID NO: 2598 - RNA, 25 nt, synthetic construct
  source 1..25: mol_type = other RNA
tcccccgcctggaaactgaggacgg

SEQ ID NO: 2599 - RNA, 25 nt, synthetic construct
  source 1..25: mol_type = other RNA
cccccgcctggaaactgaggacggc

SEQ ID NO: 2600 - RNA, 25 nt, synthetic construct
  source 1..25: mol_type = other RNA
ccccgcctggaaactgaggacggca

SEQ ID NO: 2601 - RNA, 25 nt, synthetic construct
  source 1..25: mol_type = other RNA
cccgcctggaaactgaggacggcaa

SEQ ID NO: 2602 - RNA, 25 nt, synthetic construct
  source 1..25: mol_type = other RNA
ccgcctggaaactgaggacggcaac

SEQ ID NO: 2603 - RNA, 25 nt, synthetic construct
  source 1..25: mol_type = other RNA
cgcctggaaactgaggacggcaacc

SEQ ID NO: 2604 - RNA, 25 nt, synthetic construct
  source 1..25: mol_type = other RNA
gcctggaaactgaggacggcaaccc

SEQ ID NO: 2605 - RNA, 25 nt, synthetic construct
  source 1..25: mol_type = other RNA
cctggaaactgaggacggcaacccc

SEQ ID NO: 2606 - RNA, 25 nt, synthetic construct
  source 1..25: mol_type = other RNA
ctggaaactgaggacggcaaccccc

SEQ ID NO: 2607 - RNA, 25 nt, synthetic construct
  source 1..25: mol_type = other RNA
tggaaactgaggacggcaaccccca

SEQ ID NO: 2608 - RNA, 25 nt, synthetic construct
  source 1..25: mol_type = other RNA
ggaaactgaggacggcaacccccac

SEQ ID NO: 2609 - RNA, 25 nt, synthetic construct
  source 1..25: mol_type = other RNA
gaaactgaggacggcaacccccacc

SEQ ID NO: 2610 - RNA, 25 nt, synthetic construct
  source 1..25: mol_type = other RNA
aaactgaggacggcaacccccaccc

SEQ ID NO: 2611 - RNA, 25 nt, synthetic construct
  source 1..25: mol_type = other RNA
aactgaggacggcaacccccaccct

SEQ ID NO: 2612 - RNA, 25 nt, synthetic construct
  source 1..25: mol_type = other RNA
actgaggacggcaacccccaccctc

SEQ ID NO: 2613 - RNA, 25 nt, synthetic construct
  source 1..25: mol_type = other RNA
ctgaggacggcaacccccaccctcg

SEQ ID NO: 2614 - RNA, 25 nt, synthetic construct
  source 1..25: mol_type = other RNA
tgaggacggcaacccccaccctcgc

SEQ ID NO: 2615 - RNA, 25 nt, synthetic construct
  source 1..25: mol_type = other RNA
gaggacggcaacccccaccctcgca

SEQ ID NO: 2616 - RNA, 25 nt, synthetic construct
  source 1..25: mol_type = other RNA
aggacggcaacccccaccctcgcag

SEQ ID NO: 2617 - RNA, 25 nt, synthetic construct
  source 1..25: mol_type = other RNA
ggacggcaacccccaccctcgcagg

SEQ ID NO: 2618 - RNA, 25 nt, synthetic construct
  source 1..25: mol_type = other RNA
gacggcaacccccaccctcgcaggg

SEQ ID NO: 2619 - RNA, 25 nt, synthetic construct
  source 1..25: mol_type = other RNA
acggcaacccccaccctcgcagggc

SEQ ID NO: 2620 - RNA, 25 nt, synthetic construct
  source 1..25: mol_type = other RNA
cggcaacccccaccctcgcagggcc

SEQ ID NO: 2621 - RNA, 25 nt, synthetic construct
  source 1..25: mol_type = other RNA
ggcaacccccaccctcgcagggccg

SEQ ID NO: 2622 - RNA, 25 nt, synthetic construct
  source 1..25: mol_type = other RNA
gcaacccccaccctcgcagggccgg

SEQ ID NO: 2623 - RNA, 25 nt, synthetic construct
  source 1..25: mol_type = other RNA
caacccccaccctcgcagggccggt

SEQ ID NO: 2624 - RNA, 25 nt, synthetic construct
  source 1..25: mol_type = other RNA
aacccccaccctcgcagggccggtg

SEQ ID NO: 2625 - RNA, 25 nt, synthetic construct
  source 1..25: mol_type = other RNA
acccccaccctcgcagggccggtgg

SEQ ID NO: 2626 - RNA, 25 nt, synthetic construct
  source 1..25: mol_type = other RNA
cccccaccctcgcagggccggtggg

SEQ ID NO: 2627 - RNA, 25 nt, synthetic construct
  source 1..25: mol_type = other RNA
ccccaccctcgcagggccggtggga

SEQ ID NO: 2628 - RNA, 25 nt, synthetic construct
  source 1..25: mol_type = other RNA
cccaccctcgcagggccggtgggaa

SEQ ID NO: 2629 - RNA, 25 nt, synthetic construct
  source 1..25: mol_type = other RNA
ccaccctcgcagggccggtgggaag

SEQ ID NO: 2630 - RNA, 25 nt, synthetic construct
  source 1..25: mol_type = other RNA
caccctcgcagggccggtgggaaga

SEQ ID NO: 2631 - RNA, 25 nt, synthetic construct
  source 1..25: mol_type = other RNA
accctcgcagggccggtgggaagac

SEQ ID NO: 2632 - RNA, 25 nt, synthetic construct
  source 1..25: mol_type = other RNA
ccctcgcagggccggtgggaagaca

SEQ ID NO: 2633 - RNA, 25 nt, synthetic construct
  source 1..25: mol_type = other RNA
cctcgcagggccggtgggaagacac

SEQ ID NO: 2634 - RNA, 25 nt, synthetic construct
  source 1..25: mol_type = other RNA
ctcgcagggccggtgggaagacaca

SEQ ID NO: 2635 - RNA, 25 nt, synthetic construct
  source 1..25: mol_type = other RNA
tcgcagggccggtgggaagacacaa

SEQ ID NO: 2636 - RNA, 25 nt, synthetic construct
  source 1..25: mol_type = other RNA
cgcagggccggtgggaagacacaaa

SEQ ID NO: 2637 - RNA, 25 nt, synthetic construct
  source 1..25: mol_type = other RNA
gcagggccggtgggaagacacaaag

SEQ ID NO: 2638 - RNA, 25 nt, synthetic construct
  source 1..25: mol_type = other RNA
cagggccggtgggaagacacaaagt

SEQ ID NO: 2639 - RNA, 25 nt, synthetic construct
  source 1..25: mol_type = other RNA
agggccggtgggaagacacaaagtg

SEQ ID NO: 2640 - RNA, 25 nt, synthetic construct
  source 1..25: mol_type = other RNA
gggccggtgggaagacacaaagtga

SEQ ID NO: 2641 - RNA, 25 nt, synthetic construct
  source 1..25: mol_type = other RNA
ggccggtgggaagacacaaagtgat

SEQ ID NO: 2642 - RNA, 25 nt, synthetic construct
  source 1..25: mol_type = other RNA
gccggtgggaagacacaaagtgatg

SEQ ID NO: 2643 - RNA, 25 nt, synthetic construct
  source 1..25: mol_type = other RNA
ccggtgggaagacacaaagtgatgt

SEQ ID NO: 2644 - RNA, 25 nt, synthetic construct
  source 1..25: mol_type = other RNA
cggtgggaagacacaaagtgatgtg

SEQ ID NO: 2645 - RNA, 25 nt, synthetic construct
  source 1..25: mol_type = other RNA
ggtgggaagacacaaagtgatgtgg

SEQ ID NO: 2646 - RNA, 25 nt, synthetic construct
  source 1..25: mol_type = other RNA
gtgggaagacacaaagtgatgtggg

SEQ ID NO: 2647 - RNA, 25 nt, synthetic construct
  source 1..25: mol_type = other RNA
tgggaagacacaaagtgatgtgggc

SEQ ID NO: 2648 - RNA, 25 nt, synthetic construct
  source 1..25: mol_type = other RNA
gggaagacacaaagtgatgtgggca

SEQ ID NO: 2649 - RNA, 25 nt, synthetic construct
  source 1..25: mol_type = other RNA
ggaagacacaaagtgatgtgggcaa

SEQ ID NO: 2650 - RNA, 25 nt, synthetic construct
  source 1..25: mol_type = other RNA
gaagacacaaagtgatgtgggcaag

SEQ ID NO: 2651 - RNA, 25 nt, synthetic construct
  source 1..25: mol_type = other RNA
aagacacaaagtgatgtgggcaagt

SEQ ID NO: 2652 - RNA, 25 nt, synthetic construct
  source 1..25: mol_type = other RNA
agacacaaagtgatgtgggcaagtg

SEQ ID NO: 2653 - RNA, 25 nt, synthetic construct
  source 1..25: mol_type = other RNA
gacacaaagtgatgtgggcaagtgc

SEQ ID NO: 2654 - RNA, 25 nt, synthetic construct
  source 1..25: mol_type = other RNA
acacaaagtgatgtgggcaagtgcc

SEQ ID NO: 2655 - RNA, 25 nt, synthetic construct
  source 1..25: mol_type = other RNA
cacaaagtgatgtgggcaagtgcca

SEQ ID NO: 2656 - RNA, 25 nt, synthetic construct
  source 1..25: mol_type = other RNA
acaaagtgatgtgggcaagtgccag

SEQ ID NO: 2657 - RNA, 25 nt, synthetic construct
  source 1..25: mol_type = other RNA
caaagtgatgtgggcaagtgccagg

SEQ ID NO: 2658 - RNA, 25 nt, synthetic construct
  source 1..25: mol_type = other RNA
aaagtgatgtgggcaagtgccaggc

SEQ ID NO: 2659 - RNA, 25 nt, synthetic construct
  source 1..25: mol_type = other RNA
aagtgatgtgggcaagtgccaggcc

SEQ ID NO: 2660 - RNA, 25 nt, synthetic construct
  source 1..25: mol_type = other RNA
agtgatgtgggcaagtgccaggccc

SEQ ID NO: 2661 - RNA, 25 nt, synthetic construct
  source 1..25: mol_type = other RNA
gtgatgtgggcaagtgccaggccca

SEQ ID NO: 2662 - RNA, 25 nt, synthetic construct
  source 1..25: mol_type = other RNA
tgatgtgggcaagtgccaggcccac

SEQ ID NO: 2663 - RNA, 25 nt, synthetic construct
  source 1..25: mol_type = other RNA
gatgtgggcaagtgccaggcccaca

SEQ ID NO: 2664 - RNA, 25 nt, synthetic construct
  source 1..25: mol_type = other RNA
atgtgggcaagtgccaggcccacat

SEQ ID NO: 2665 - RNA, 25 nt, synthetic construct
  source 1..25: mol_type = other RNA
tgtgggcaagtgccaggcccacatg

SEQ ID NO: 2666 - RNA, 25 nt, synthetic construct
  source 1..25: mol_type = other RNA
gtgggcaagtgccaggcccacatgg

SEQ ID NO: 2667 - RNA, 25 nt, synthetic construct
  source 1..25: mol_type = other RNA
tgggcaagtgccaggcccacatggt

SEQ ID NO: 2668 - RNA, 25 nt, synthetic construct
  source 1..25: mol_type = other RNA
gggcaagtgccaggcccacatggta

SEQ ID NO: 2669 - RNA, 25 nt, synthetic construct
  source 1..25: mol_type = other RNA
ggcaagtgccaggcccacatggtaa

SEQ ID NO: 2670 - RNA, 25 nt, synthetic construct
  source 1..25: mol_type = other RNA
gcaagtgccaggcccacatggtaag

SEQ ID NO: 2671 - RNA, 25 nt, synthetic construct
  source 1..25: mol_type = other RNA
caagtgccaggcccacatggtaagt

SEQ ID NO: 2672 - RNA, 25 nt, synthetic construct
  source 1..25: mol_type = other RNA
aagtgccaggcccacatggtaagta

SEQ ID NO: 2673 - RNA, 25 nt, synthetic construct
  source 1..25: mol_type = other RNA
agtgccaggcccacatggtaagtac

SEQ ID NO: 2674 - RNA, 25 nt, synthetic construct
  source 1..25: mol_type = other RNA
gtgccaggcccacatggtaagtacc

SEQ ID NO: 2675 - RNA, 25 nt, synthetic construct
  source 1..25: mol_type = other RNA
tgccaggcccacatggtaagtaccc

SEQ ID NO: 2676 - RNA, 25 nt, synthetic construct
  source 1..25: mol_type = other RNA
gccaggcccacatggtaagtaccca

SEQ ID NO: 2677 - RNA, 25 nt, synthetic construct
  source 1..25: mol_type = other RNA
ccaggcccacatggtaagtacccaa

SEQ ID NO: 2678 - RNA, 25 nt, synthetic construct
  source 1..25: mol_type = other RNA
caggcccacatggtaagtacccaac

SEQ ID NO: 2679 - RNA, 25 nt, synthetic construct
  source 1..25: mol_type = other RNA
aggcccacatggtaagtacccaact

SEQ ID NO: 2680 - RNA, 25 nt, synthetic construct
  source 1..25: mol_type = other RNA
ggcccacatggtaagtacccaacta

SEQ ID NO: 2681 - RNA, 25 nt, synthetic construct
  source 1..25: mol_type = other RNA
gcccacatggtaagtacccaactaa

SEQ ID NO: 2682 - RNA, 25 nt, synthetic construct
  source 1..25: mol_type = other RNA
cccacatggtaagtacccaactaat

SEQ ID NO: 2683 - RNA, 25 nt, synthetic construct
  source 1..25: mol_type = other RNA
ccacatggtaagtacccaactaatc

SEQ ID NO: 2684 - RNA, 25 nt, synthetic construct
  source 1..25: mol_type = other RNA
cacatggtaagtacccaactaatct

SEQ ID NO: 2685 - RNA, 25 nt, synthetic construct
  source 1..25: mol_type = other RNA
acatggtaagtacccaactaatctc

SEQ ID NO: 2686 - RNA, 25 nt, synthetic construct
  source 1..25: mol_type = other RNA
catggtaagtacccaactaatctcg

SEQ ID NO: 2687 - RNA, 25 nt, synthetic construct
  source 1..25: mol_type = other RNA
atggtaagtacccaactaatctcgc

SEQ ID NO: 2688 - RNA, 25 nt, synthetic construct
  source 1..25: mol_type = other RNA
tggtaagtacccaactaatctcgcc

SEQ ID NO: 2689 - RNA, 25 nt, synthetic construct
  source 1..25: mol_type = other RNA
ggtaagtacccaactaatctcgccc

SEQ ID NO: 2690 - RNA, 25 nt, synthetic construct
  source 1..25: mol_type = other RNA
gtaagtacccaactaatctcgcccc

SEQ ID NO: 2691 - RNA, 25 nt, synthetic construct
  source 1..25: mol_type = other RNA
taagtacccaactaatctcgcccct

SEQ ID NO: 2692 - RNA, 25 nt, synthetic construct
  source 1..25: mol_type = other RNA
aagtacccaactaatctcgcccctc

SEQ ID NO: 2693 - RNA, 25 nt, synthetic construct
  source 1..25: mol_type = other RNA
agtacccaactaatctcgcccctct

SEQ ID NO: 2694 - RNA, 25 nt, synthetic construct
  source 1..25: mol_type = other RNA
gtacccaactaatctcgcccctctc

SEQ ID NO: 2695 - RNA, 25 nt, synthetic construct
  source 1..25: mol_type = other RNA
tacccaactaatctcgcccctctca

SEQ ID NO: 2696 - RNA, 25 nt, synthetic construct
  source 1..25: mol_type = other RNA
acccaactaatctcgcccctctcag

SEQ ID NO: 2697 - RNA, 25 nt, synthetic construct
  source 1..25: mol_type = other RNA
cccaactaatctcgcccctctcagg

SEQ ID NO: 2698 - RNA, 25 nt, synthetic construct
  source 1..25: mol_type = other RNA
ccaactaatctcgcccctctcagga

SEQ ID NO: 2699 - RNA, 25 nt, synthetic construct
  source 1..25: mol_type = other RNA
caactaatctcgcccctctcaggac

SEQ ID NO: 2700 - RNA, 25 nt, synthetic construct
  source 1..25: mol_type = other RNA
aactaatctcgcccctctcaggacc

SEQ ID NO: 2701 - RNA, 25 nt, synthetic construct
  source 1..25: mol_type = other RNA
actaatctcgcccctctcaggacct

SEQ ID NO: 2702 - RNA, 25 nt, synthetic construct
  source 1..25: mol_type = other RNA
ctaatctcgcccctctcaggaccta

SEQ ID NO: 2703 - RNA, 25 nt, synthetic construct
  source 1..25: mol_type = other RNA
taatctcgcccctctcaggacctac

SEQ ID NO: 2704 - RNA, 26 nt, synthetic construct
  source 1..26: mol_type = other RNA
tcttttaaaaattacctagaaataag

SEQ ID NO: 2705 - RNA, 26 nt, synthetic construct
  source 1..26: mol_type = other RNA
cttttaaaaattacctagaaataagg

SEQ ID NO: 2706 - RNA, 26 nt, synthetic construct
  source 1..26: mol_type = other RNA
ttttaaaaattacctagaaataaggt

SEQ ID NO: 2707 - RNA, 26 nt, synthetic construct
  source 1..26: mol_type = other RNA
tttaaaaattacctagaaataaggtt

SEQ ID NO: 2708 - RNA, 26 nt, synthetic construct
  source 1..26: mol_type = other RNA
ttaaaaattacctagaaataaggttt

SEQ ID NO: 2709 - RNA, 26 nt, synthetic construct
  source 1..26: mol_type = other RNA
taaaaattacctagaaataaggtttc

SEQ ID NO: 2710 - RNA, 26 nt, synthetic construct
  source 1..26: mol_type = other RNA
aaaaattacctagaaataaggtttct

SEQ ID NO: 2711 - RNA, 26 nt, synthetic construct
  source 1..26: mol_type = other RNA
aaaattacctagaaataaggtttctt

SEQ ID NO: 2712 - RNA, 26 nt, synthetic construct
  source 1..26: mol_type = other RNA
aaattacctagaaataaggtttcttt

SEQ ID NO: 2713 - RNA, 26 nt, synthetic construct
  source 1..26: mol_type = other RNA
aattacctagaaataaggtttcttta

SEQ ID NO: 2714 - RNA, 26 nt, synthetic construct
  source 1..26: mol_type = other RNA
attacctagaaataaggtttctttaa

SEQ ID NO: 2715 - RNA, 26 nt, synthetic construct
  source 1..26: mol_type = other RNA
ttacctagaaataaggtttctttaat

SEQ ID NO: 2716 - RNA, 26 nt, synthetic construct
  source 1..26: mol_type = other RNA
tacctagaaataaggtttctttaatt

SEQ ID NO: 2717 - RNA, 26 nt, synthetic construct
  source 1..26: mol_type = other RNA
acctagaaataaggtttctttaattg

SEQ ID NO: 2718 - RNA, 26 nt, synthetic construct
  source 1..26: mol_type = other RNA
cctagaaataaggtttctttaattgc

SEQ ID NO: 2719 - RNA, 26 nt, synthetic construct
  source 1..26: mol_type = other RNA
ctagaaataaggtttctttaattgct

SEQ ID NO: 2720 - RNA, 26 nt, synthetic construct
  source 1..26: mol_type = other RNA
tagaaataaggtttctttaattgctg

SEQ ID NO: 2721 - RNA, 26 nt, synthetic construct
  source 1..26: mol_type = other RNA
agaaataaggtttctttaattgctgg

SEQ ID NO: 2722 - RNA, 26 nt, synthetic construct
  source 1..26: mol_type = other RNA
gaaataaggtttctttaattgctggt

SEQ ID NO: 2723 - RNA, 26 nt, synthetic construct
  source 1..26: mol_type = other RNA
aaataaggtttctttaattgctggtt

SEQ ID NO: 2724 - RNA, 26 nt, synthetic construct
  source 1..26: mol_type = other RNA
aataaggtttctttaattgctggtta

SEQ ID NO: 2725 - RNA, 26 nt, synthetic construct
  source 1..26: mol_type = other RNA
ataaggtttctttaattgctggttaa

SEQ ID NO: 2726 - RNA, 26 nt, synthetic construct
  source 1..26: mol_type = other RNA
taaggtttctttaattgctggttaaa

SEQ ID NO: 2727 - RNA, 26 nt, synthetic construct
  source 1..26: mol_type = other RNA
aaggtttctttaattgctggttaaaa

SEQ ID NO: 2728 - RNA, 26 nt, synthetic construct
  source 1..26: mol_type = other RNA
aggtttctttaattgctggttaaaat

SEQ ID NO: 2729 - RNA, 26 nt, synthetic construct
  source 1..26: mol_type = other RNA
ggtttctttaattgctggttaaaatg

SEQ ID NO: 2730 - RNA, 26 nt, synthetic construct
  source 1..26: mol_type = other RNA
gtttctttaattgctggttaaaatgc

SEQ ID NO: 2731 - RNA, 26 nt, synthetic construct
  source 1..26: mol_type = other RNA
tttctttaattgctggttaaaatgct

SEQ ID NO: 2732 - RNA, 26 nt, synthetic construct
  source 1..26: mol_type = other RNA
ttctttaattgctggttaaaatgctc

SEQ ID NO: 2733 - RNA, 26 nt, synthetic construct
  source 1..26: mol_type = other RNA
tctttaattgctggttaaaatgctcc

SEQ ID NO: 2734 - RNA, 26 nt, synthetic construct
  source 1..26: mol_type = other RNA
ctttaattgctggttaaaatgctccc

SEQ ID NO: 2735 - RNA, 26 nt, synthetic construct
  source 1..26: mol_type = other RNA
tttaattgctggttaaaatgctcccg

SEQ ID NO: 2736 - RNA, 26 nt, synthetic construct
  source 1..26: mol_type = other RNA
ttaattgctggttaaaatgctcccgt

SEQ ID NO: 2737 - RNA, 26 nt, synthetic construct
  source 1..26: mol_type = other RNA
taattgctggttaaaatgctcccgtg

SEQ ID NO: 2738 - RNA, 26 nt, synthetic construct
  source 1..26: mol_type = other RNA
aattgctggttaaaatgctcccgtgc

SEQ ID NO: 2739 - RNA, 26 nt, synthetic construct
  source 1..26: mol_type = other RNA
attgctggttaaaatgctcccgtgca

SEQ ID NO: 2740 - RNA, 26 nt, synthetic construct
  source 1..26: mol_type = other RNA
ttgctggttaaaatgctcccgtgcag

SEQ ID NO: 2741 - RNA, 26 nt, synthetic construct
  source 1..26: mol_type = other RNA
tgctggttaaaatgctcccgtgcaga

SEQ ID NO: 2742 - RNA, 26 nt, synthetic construct
  source 1..26: mol_type = other RNA
gctggttaaaatgctcccgtgcagaa

SEQ ID NO: 2743 - RNA, 26 nt, synthetic construct
  source 1..26: mol_type = other RNA
ctggttaaaatgctcccgtgcagaaa

SEQ ID NO: 2744 - RNA, 26 nt, synthetic construct
  source 1..26: mol_type = other RNA
tggttaaaatgctcccgtgcagaaaa

SEQ ID NO: 2745 - RNA, 26 nt, synthetic construct
  source 1..26: mol_type = other RNA
ggttaaaatgctcccgtgcagaaaac

SEQ ID NO: 2746 - RNA, 26 nt, synthetic construct
  source 1..26: mol_type = other RNA
gttaaaatgctcccgtgcagaaaaca

SEQ ID NO: 2747 - RNA, 26 nt, synthetic construct
  source 1..26: mol_type = other RNA
ttaaaatgctcccgtgcagaaaacag

SEQ ID NO: 2748 - RNA, 26 nt, synthetic construct
  source 1..26: mol_type = other RNA
taaaatgctcccgtgcagaaaacagg

SEQ ID NO: 2749 - RNA, 26 nt, synthetic construct
  source 1..26: mol_type = other RNA
aaaatgctcccgtgcagaaaacagga

SEQ ID NO: 2750 - RNA, 26 nt, synthetic construct
  source 1..26: mol_type = other RNA
aaatgctcccgtgcagaaaacaggaa

SEQ ID NO: 2751 - RNA, 26 nt, synthetic construct
  source 1..26: mol_type = other RNA
aatgctcccgtgcagaaaacaggaaa

SEQ ID NO: 2752 - RNA, 26 nt, synthetic construct
  source 1..26: mol_type = other RNA
atgctcccgtgcagaaaacaggaaag

SEQ ID NO: 2753 - RNA, 26 nt, synthetic construct
  source 1..26: mol_type = other RNA
tgctcccgtgcagaaaacaggaaaga

SEQ ID NO: 2754 - RNA, 26 nt, synthetic construct
  source 1..26: mol_type = other RNA
gctcccgtgcagaaaacaggaaagaa

SEQ ID NO: 2755 - RNA, 26 nt, synthetic construct
  source 1..26: mol_type = other RNA
ctcccgtgcagaaaacaggaaagaac

SEQ ID NO: 2756 - RNA, 26 nt, synthetic construct
  source 1..26: mol_type = other RNA
tcccgtgcagaaaacaggaaagaacc

SEQ ID NO: 2757 - RNA, 26 nt, synthetic construct
  source 1..26: mol_type = other RNA
cccgtgcagaaaacaggaaagaacct

SEQ ID NO: 2758 - RNA, 26 nt, synthetic construct
  source 1..26: mol_type = other RNA
ccgtgcagaaaacaggaaagaacctg

SEQ ID NO: 2759 - RNA, 26 nt, synthetic construct
  source 1..26: mol_type = other RNA
cgtgcagaaaacaggaaagaacctgc

SEQ ID NO: 2760 - RNA, 26 nt, synthetic construct
  source 1..26: mol_type = other RNA
gtgcagaaaacaggaaagaacctgcc

SEQ ID NO: 2761 - RNA, 26 nt, synthetic construct
  source 1..26: mol_type = other RNA
tgcagaaaacaggaaagaacctgcct

SEQ ID NO: 2762 - RNA, 26 nt, synthetic construct
  source 1..26: mol_type = other RNA
gcagaaaacaggaaagaacctgcctg

SEQ ID NO: 2763 - RNA, 26 nt, synthetic construct
  source 1..26: mol_type = other RNA
cagaaaacaggaaagaacctgcctgg

SEQ ID NO: 2764 - RNA, 26 nt, synthetic construct
  source 1..26: mol_type = other RNA
agaaaacaggaaagaacctgcctggt

SEQ ID NO: 2765 - RNA, 26 nt, synthetic construct
  source 1..26: mol_type = other RNA
gaaaacaggaaagaacctgcctggtt

SEQ ID NO: 2766 - RNA, 26 nt, synthetic construct
  source 1..26: mol_type = other RNA
aaaacaggaaagaacctgcctggttc

SEQ ID NO: 2767 - RNA, 26 nt, synthetic construct
  source 1..26: mol_type = other RNA
aaacaggaaagaacctgcctggttcc

SEQ ID NO: 2768 - RNA, 26 nt, synthetic construct
  source 1..26: mol_type = other RNA
aacaggaaagaacctgcctggttcct

SEQ ID NO: 2769 - RNA, 26 nt, synthetic construct
  source 1..26: mol_type = other RNA
acaggaaagaacctgcctggttcctt

SEQ ID NO: 2770 - RNA, 26 nt, synthetic construct
  source 1..26: mol_type = other RNA
caggaaagaacctgcctggttcctta

SEQ ID NO: 2771 - RNA, 26 nt, synthetic construct
  source 1..26: mol_type = other RNA
aggaaagaacctgcctggttccttag

SEQ ID NO: 2772 - RNA, 26 nt, synthetic construct
  source 1..26: mol_type = other RNA
ggaaagaacctgcctggttccttagc

SEQ ID NO: 2773 - RNA, 26 nt, synthetic construct
  source 1..26: mol_type = other RNA
gaaagaacctgcctggttccttagca

SEQ ID NO: 2774 - RNA, 26 nt, synthetic construct
  source 1..26: mol_type = other RNA
aaagaacctgcctggttccttagcaa

SEQ ID NO: 2775 - RNA, 26 nt, synthetic construct
  source 1..26: mol_type = other RNA
aagaacctgcctggttccttagcaaa

SEQ ID NO: 2776 - RNA, 26 nt, synthetic construct
  source 1..26: mol_type = other RNA
agaacctgcctggttccttagcaaat

SEQ ID NO: 2777 - RNA, 26 nt, synthetic construct
  source 1..26: mol_type = other RNA
gaacctgcctggttccttagcaaatc

SEQ ID NO: 2778 - RNA, 26 nt, synthetic construct
  source 1..26: mol_type = other RNA
aacctgcctggttccttagcaaatct

SEQ ID NO: 2779 - RNA, 26 nt, synthetic construct
  source 1..26: mol_type = other RNA
acctgcctggttccttagcaaatctg

SEQ ID NO: 2780 - RNA, 26 nt, synthetic construct
  source 1..26: mol_type = other RNA
cctgcctggttccttagcaaatctga

SEQ ID NO: 2781 - RNA, 26 nt, synthetic construct
  source 1..26: mol_type = other RNA
ctgcctggttccttagcaaatctgag

SEQ ID NO: 2782 - RNA, 26 nt, synthetic construct
  source 1..26: mol_type = other RNA
tgcctggttccttagcaaatctgagt

SEQ ID NO: 2783 - RNA, 26 nt, synthetic construct
  source 1..26: mol_type = other RNA
gcctggttccttagcaaatctgagtt

SEQ ID NO: 2784 - RNA, 26 nt, synthetic construct
  source 1..26: mol_type = other RNA
cctggttccttagcaaatctgagttc

SEQ ID NO: 2785 - RNA, 26 nt, synthetic construct
  source 1..26: mol_type = other RNA
ctggttccttagcaaatctgagttcc

SEQ ID NO: 2786 - RNA, 26 nt, synthetic construct
  source 1..26: mol_type = other RNA
tggttccttagcaaatctgagttcca

SEQ ID NO: 2787 - RNA, 26 nt, synthetic construct
  source 1..26: mol_type = other RNA
ggttccttagcaaatctgagttccag

SEQ ID NO: 2788 - RNA, 26 nt, synthetic construct
  source 1..26: mol_type = other RNA
gttccttagcaaatctgagttccagt

SEQ ID NO: 2789 - RNA, 26 nt, synthetic construct
  source 1..26: mol_type = other RNA
ttccttagcaaatctgagttccagtc

SEQ ID NO: 2790 - RNA, 26 nt, synthetic construct
  source 1..26: mol_type = other RNA
tccttagcaaatctgagttccagtcc

SEQ ID NO: 2791 - RNA, 26 nt, synthetic construct
  source 1..26: mol_type = other RNA
ccttagcaaatctgagttccagtccc

SEQ ID NO: 2792 - RNA, 26 nt, synthetic construct
  source 1..26: mol_type = other RNA
cttagcaaatctgagttccagtccca

SEQ ID NO: 2793 - RNA, 26 nt, synthetic construct
  source 1..26: mol_type = other RNA
ttagcaaatctgagttccagtcccag

SEQ ID NO: 2794 - RNA, 26 nt, synthetic construct
  source 1..26: mol_type = other RNA
tagcaaatctgagttccagtcccagg

SEQ ID NO: 2795 - RNA, 26 nt, synthetic construct
  source 1..26: mol_type = other RNA
agcaaatctgagttccagtcccaggt

SEQ ID NO: 2796 - RNA, 26 nt, synthetic construct
  source 1..26: mol_type = other RNA
gcaaatctgagttccagtcccaggtc

SEQ ID NO: 2797 - RNA, 26 nt, synthetic construct
  source 1..26: mol_type = other RNA
caaatctgagttccagtcccaggtcc

SEQ ID NO: 2798 - RNA, 26 nt, synthetic construct
  source 1..26: mol_type = other RNA
aaatctgagttccagtcccaggtcca

SEQ ID NO: 2799 - RNA, 26 nt, synthetic construct
  source 1..26: mol_type = other RNA
aatctgagttccagtcccaggtccac

SEQ ID NO: 2800 - RNA, 26 nt, synthetic construct
  source 1..26: mol_type = other RNA
atctgagttccagtcccaggtccact

SEQ ID NO: 2801 - RNA, 26 nt, synthetic construct
  source 1..26: mol_type = other RNA
tctgagttccagtcccaggtccacta

SEQ ID NO: 2802 - RNA, 26 nt, synthetic construct
  source 1..26: mol_type = other RNA
ctgagttccagtcccaggtccactac

SEQ ID NO: 2803 - RNA, 26 nt, synthetic construct
  source 1..26: mol_type = other RNA
tgagttccagtcccaggtccactact

SEQ ID NO: 2804 - RNA, 26 nt, synthetic construct
  source 1..26: mol_type = other RNA
gagttccagtcccaggtccactacta

SEQ ID NO: 2805 - RNA, 26 nt, synthetic construct
  source 1..26: mol_type = other RNA
agttccagtcccaggtccactactat

SEQ ID NO: 2806 - RNA, 26 nt, synthetic construct
  source 1..26: mol_type = other RNA
gttccagtcccaggtccactactatt

SEQ ID NO: 2807 - RNA, 26 nt, synthetic construct
  source 1..26: mol_type = other RNA
ttccagtcccaggtccactactatta

SEQ ID NO: 2808 - RNA, 26 nt, synthetic construct
  source 1..26: mol_type = other RNA
tccagtcccaggtccactactattag

SEQ ID NO: 2809 - RNA, 26 nt, synthetic construct
  source 1..26: mol_type = other RNA
ccagtcccaggtccactactattagc

SEQ ID NO: 2810 - RNA, 26 nt, synthetic construct
  source 1..26: mol_type = other RNA
cagtcccaggtccactactattagct

SEQ ID NO: 2811 - RNA, 26 nt, synthetic construct
  source 1..26: mol_type = other RNA
agtcccaggtccactactattagctg

SEQ ID NO: 2812 - RNA, 26 nt, synthetic construct
  source 1..26: mol_type = other RNA
gtcccaggtccactactattagctga

SEQ ID NO: 2813 - RNA, 26 nt, synthetic construct
  source 1..26: mol_type = other RNA
tcccaggtccactactattagctgag

SEQ ID NO: 2814 - RNA, 26 nt, synthetic construct
  source 1..26: mol_type = other RNA
cccaggtccactactattagctgagt

SEQ ID NO: 2815 - RNA, 26 nt, synthetic construct
  source 1..26: mol_type = other RNA
ccaggtccactactattagctgagtg

SEQ ID NO: 2816 - RNA, 26 nt, synthetic construct
  source 1..26: mol_type = other RNA
caggtccactactattagctgagtga

SEQ ID NO: 2817 - RNA, 26 nt, synthetic construct
  source 1..26: mol_type = other RNA
aggtccactactattagctgagtgac

SEQ ID NO: 2818 - RNA, 26 nt, synthetic construct
  source 1..26: mol_type = other RNA
ggtccactactattagctgagtgacg

SEQ ID NO: 2819 - RNA, 26 nt, synthetic construct
  source 1..26: mol_type = other RNA
gtccactactattagctgagtgacgc

SEQ ID NO: 2820 - RNA, 26 nt, synthetic construct
  source 1..26: mol_type = other RNA
tccactactattagctgagtgacgct

SEQ ID NO: 2821 - RNA, 26 nt, synthetic construct
  source 1..26: mol_type = other RNA
ccactactattagctgagtgacgctt

SEQ ID NO: 2822 - RNA, 26 nt, synthetic construct
  source 1..26: mol_type = other RNA
cactactattagctgagtgacgcttc

SEQ ID NO: 2823 - RNA, 26 nt, synthetic construct
  source 1..26: mol_type = other RNA
actactattagctgagtgacgcttcc

SEQ ID NO: 2824 - RNA, 26 nt, synthetic construct
  source 1..26: mol_type = other RNA
ctactattagctgagtgacgcttcca

SEQ ID NO: 2825 - RNA, 26 nt, synthetic construct
  source 1..26: mol_type = other RNA
tactattagctgagtgacgcttccag

SEQ ID NO: 2826 - RNA, 26 nt, synthetic construct
  source 1..26: mol_type = other RNA
actattagctgagtgacgcttccagc

SEQ ID NO: 2827 - RNA, 26 nt, synthetic construct
  source 1..26: mol_type = other RNA
ctattagctgagtgacgcttccagcc

SEQ ID NO: 2828 - RNA, 26 nt, synthetic construct
  source 1..26: mol_type = other RNA
tattagctgagtgacgcttccagccc

SEQ ID NO: 2829 - RNA, 26 nt, synthetic construct
  source 1..26: mol_type = other RNA
attagctgagtgacgcttccagcccg

SEQ ID NO: 2830 - RNA, 26 nt, synthetic construct
  source 1..26: mol_type = other RNA
ttagctgagtgacgcttccagcccgt

SEQ ID NO: 2831 - RNA, 26 nt, synthetic construct
  source 1..26: mol_type = other RNA
tagctgagtgacgcttccagcccgtt

SEQ ID NO: 2832 - RNA, 26 nt, synthetic construct
  source 1..26: mol_type = other RNA
agctgagtgacgcttccagcccgttt

SEQ ID NO: 2833 - RNA, 26 nt, synthetic construct
  source 1..26: mol_type = other RNA
gctgagtgacgcttccagcccgtttc

SEQ ID NO: 2834 - RNA, 26 nt, synthetic construct
  source 1..26: mol_type = other RNA
ctgagtgacgcttccagcccgtttcc

SEQ ID NO: 2835 - RNA, 26 nt, synthetic construct
  source 1..26: mol_type = other RNA
tgagtgacgcttccagcccgtttccc

SEQ ID NO: 2836 - RNA, 26 nt, synthetic construct
  source 1..26: mol_type = other RNA
gagtgacgcttccagcccgtttcccc

SEQ ID NO: 2837 - RNA, 26 nt, synthetic construct
  source 1..26: mol_type = other RNA
agtgacgcttccagcccgtttccccc

SEQ ID NO: 2838 - RNA, 26 nt, synthetic construct
  source 1..26: mol_type = other RNA
gtgacgcttccagcccgtttcccccg

SEQ ID NO: 2839 - RNA, 26 nt, synthetic construct
  source 1..26: mol_type = other RNA
tgacgcttccagcccgtttcccccgc

SEQ ID NO: 2840 - RNA, 26 nt, synthetic construct
  source 1..26: mol_type = other RNA
gacgcttccagcccgtttcccccgcc

SEQ ID NO: 2841 - RNA, 26 nt, synthetic construct
  source 1..26: mol_type = other RNA
acgcttccagcccgtttcccccgcct

SEQ ID NO: 2842 - RNA, 26 nt, synthetic construct
  source 1..26: mol_type = other RNA
cgcttccagcccgtttcccccgcctg

SEQ ID NO: 2843 - RNA, 26 nt, synthetic construct
  source 1..26: mol_type = other RNA
gcttccagcccgtttcccccgcctgg

SEQ ID NO: 2844 - RNA, 26 nt, synthetic construct
  source 1..26: mol_type = other RNA
cttccagcccgtttcccccgcctgga

SEQ ID NO: 2845 - RNA, 26 nt, synthetic construct
  source 1..26: mol_type = other RNA
ttccagcccgtttcccccgcctggaa

SEQ ID NO: 2846 - RNA, 26 nt, synthetic construct
  source 1..26: mol_type = other RNA
tccagcccgtttcccccgcctggaaa

SEQ ID NO: 2847 - RNA, 26 nt, synthetic construct
  source 1..26: mol_type = other RNA
ccagcccgtttcccccgcctggaaac

SEQ ID NO: 2848 - RNA, 26 nt, synthetic construct
  source 1..26: mol_type = other RNA
cagcccgtttcccccgcctggaaact

SEQ ID NO: 2849 - RNA, 26 nt, synthetic construct
  source 1..26: mol_type = other RNA
agcccgtttcccccgcctggaaactg

SEQ ID NO: 2850 - RNA, 26 nt, synthetic construct
  source 1..26: mol_type = other RNA
gcccgtttcccccgcctggaaactga

SEQ ID NO: 2851 - RNA, 26 nt, synthetic construct
  source 1..26: mol_type = other RNA
cccgtttcccccgcctggaaactgag

SEQ ID NO: 2852 - RNA, 26 nt, synthetic construct
  source 1..26: mol_type = other RNA
ccgtttcccccgcctggaaactgagg

SEQ ID NO: 2853 - RNA, 26 nt, synthetic construct
  source 1..26: mol_type = other RNA
cgtttcccccgcctggaaactgagga

SEQ ID NO: 2854 - RNA, 26 nt, synthetic construct
  source 1..26: mol_type = other RNA
gtttcccccgcctggaaactgaggac

SEQ ID NO: 2855 - RNA, 26 nt, synthetic construct
  source 1..26: mol_type = other RNA
tttcccccgcctggaaactgaggacg

SEQ ID NO: 2856 - RNA, 26 nt, synthetic construct
  source 1..26: mol_type = other RNA
ttcccccgcctggaaactgaggacgg

SEQ ID NO: 2857 - RNA, 26 nt, synthetic construct
  source 1..26: mol_type = other RNA
tcccccgcctggaaactgaggacggc

SEQ ID NO: 2858 - RNA, 26 nt, synthetic construct
  source 1..26: mol_type = other RNA
cccccgcctggaaactgaggacggca

SEQ ID NO: 2859 - RNA, 26 nt, synthetic construct
  source 1..26: mol_type = other RNA
ccccgcctggaaactgaggacggcaa

SEQ ID NO: 2860 - RNA, 26 nt, synthetic construct
  source 1..26: mol_type = other RNA
cccgcctggaaactgaggacggcaac

SEQ ID NO: 2861 - RNA, 26 nt, synthetic construct
  source 1..26: mol_type = other RNA
ccgcctggaaactgaggacggcaacc

SEQ ID NO: 2862 - RNA, 26 nt, synthetic construct
  source 1..26: mol_type = other RNA
cgcctggaaactgaggacggcaaccc

SEQ ID NO: 2863 - RNA, 26 nt, synthetic construct
  source 1..26: mol_type = other RNA
gcctggaaactgaggacggcaacccc

SEQ ID NO: 2864 - RNA, 26 nt, synthetic construct
  source 1..26: mol_type = other RNA
cctggaaactgaggacggcaaccccc

SEQ ID NO: 2865 - RNA, 26 nt, synthetic construct
  source 1..26: mol_type = other RNA
ctggaaactgaggacggcaaccccca

SEQ ID NO: 2866 - RNA, 26 nt, synthetic construct
  source 1..26: mol_type = other RNA
tggaaactgaggacggcaacccccac

SEQ ID NO: 2867 - RNA, 26 nt, synthetic construct
  source 1..26: mol_type = other RNA
ggaaactgaggacggcaacccccacc

SEQ ID NO: 2868 - RNA, 26 nt, synthetic construct
  source 1..26: mol_type = other RNA
gaaactgaggacggcaacccccaccc

SEQ ID NO: 2869 - RNA, 26 nt, synthetic construct
  source 1..26: mol_type = other RNA
aaactgaggacggcaacccccaccct

SEQ ID NO: 2870 - RNA, 26 nt, synthetic construct
  source 1..26: mol_type = other RNA
aactgaggacggcaacccccaccctc

SEQ ID NO: 2871 - RNA, 26 nt, synthetic construct
  source 1..26: mol_type = other RNA
actgaggacggcaacccccaccctcg

SEQ ID NO: 2872 - RNA, 26 nt, synthetic construct
  source 1..26: mol_type = other RNA
ctgaggacggcaacccccaccctcgc

SEQ ID NO: 2873 - RNA, 26 nt, synthetic construct
  source 1..26: mol_type = other RNA
tgaggacggcaacccccaccctcgca

SEQ ID NO: 2874 - RNA, 26 nt, synthetic construct
  source 1..26: mol_type = other RNA
gaggacggcaacccccaccctcgcag

SEQ ID NO: 2875 - RNA, 26 nt, synthetic construct
  source 1..26: mol_type = other RNA
aggacggcaacccccaccctcgcagg

SEQ ID NO: 2876 - RNA, 26 nt, synthetic construct
  source 1..26: mol_type = other RNA
ggacggcaacccccaccctcgcaggg

SEQ ID NO: 2877 - RNA, 26 nt, synthetic construct
  source 1..26: mol_type = other RNA
gacggcaacccccaccctcgcagggc

SEQ ID NO: 2878 - RNA, 26 nt, synthetic construct
  source 1..26: mol_type = other RNA
acggcaacccccaccctcgcagggcc

SEQ ID NO: 2879 - RNA, 26 nt, synthetic construct
  source 1..26: mol_type = other RNA
cggcaacccccaccctcgcagggccg

SEQ ID NO: 2880 - RNA, 26 nt, synthetic construct
  source 1..26: mol_type = other RNA
ggcaacccccaccctcgcagggccgg

SEQ ID NO: 2881 - RNA, 26 nt, synthetic construct
  source 1..26: mol_type = other RNA
gcaacccccaccctcgcagggccggt

SEQ ID NO: 2882 - RNA, 26 nt, synthetic construct
  source 1..26: mol_type = other RNA
caacccccaccctcgcagggccggtg

SEQ ID NO: 2883 - RNA, 26 nt, synthetic construct
  source 1..26: mol_type = other RNA
aacccccaccctcgcagggccggtgg

SEQ ID NO: 2884 - RNA, 26 nt, synthetic construct
  source 1..26: mol_type = other RNA
acccccaccctcgcagggccggtggg

SEQ ID NO: 2885 - RNA, 26 nt, synthetic construct
  source 1..26: mol_type = other RNA
cccccaccctcgcagggccggtggga

SEQ ID NO: 2886 - RNA, 26 nt, synthetic construct
  source 1..26: mol_type = other RNA
ccccaccctcgcagggccggtgggaa

SEQ ID NO: 2887 - RNA, 26 nt, synthetic construct
  source 1..26: mol_type = other RNA
cccaccctcgcagggccggtgggaag

SEQ ID NO: 2888 - RNA, 26 nt, synthetic construct
  source 1..26: mol_type = other RNA
ccaccctcgcagggccggtgggaaga

SEQ ID NO: 2889 - RNA, 26 nt, synthetic construct
  source 1..26: mol_type = other RNA
caccctcgcagggccggtgggaagac

SEQ ID NO: 2890 - RNA, 26 nt, synthetic construct
  source 1..26: mol_type = other RNA
accctcgcagggccggtgggaagaca

SEQ ID NO: 2891 - RNA, 26 nt, synthetic construct
  source 1..26: mol_type = other RNA
ccctcgcagggccggtgggaagacac

SEQ ID NO: 2892 - RNA, 26 nt, synthetic construct
  source 1..26: mol_type = other RNA
cctcgcagggccggtgggaagacaca

SEQ ID NO: 2893 - RNA, 26 nt, synthetic construct
  source 1..26: mol_type = other RNA
ctcgcagggccggtgggaagacacaa

SEQ ID NO: 2894 - RNA, 26 nt, synthetic construct
  source 1..26: mol_type = other RNA
tcgcagggccggtgggaagacacaaa

SEQ ID NO: 2895 - RNA, 26 nt, synthetic construct
  source 1..26: mol_type = other RNA
cgcagggccggtgggaagacacaaag

SEQ ID NO: 2896 - RNA, 26 nt, synthetic construct
  source 1..26: mol_type = other RNA
gcagggccggtgggaagacacaaagt

SEQ ID NO: 2897 - RNA, 26 nt, synthetic construct
  source 1..26: mol_type = other RNA
cagggccggtgggaagacacaaagtg

SEQ ID NO: 2898 - RNA, 26 nt, synthetic construct
  source 1..26: mol_type = other RNA
agggccggtgggaagacacaaagtga

SEQ ID NO: 2899 - RNA, 26 nt, synthetic construct
  source 1..26: mol_type = other RNA
gggccggtgggaagacacaaagtgat

SEQ ID NO: 2900 - RNA, 26 nt, synthetic construct
  source 1..26: mol_type = other RNA
ggccggtgggaagacacaaagtgatg

SEQ ID NO: 2901 - RNA, 26 nt, synthetic construct
  source 1..26: mol_type = other RNA
gccggtgggaagacacaaagtgatgt

SEQ ID NO: 2902 - RNA, 26 nt, synthetic construct
  source 1..26: mol_type = other RNA
ccggtgggaagacacaaagtgatgtg

SEQ ID NO: 2903 - RNA, 26 nt, synthetic construct
  source 1..26: mol_type = other RNA
cggtgggaagacacaaagtgatgtgg

SEQ ID NO: 2904 - RNA, 26 nt, synthetic construct
  source 1..26: mol_type = other RNA
ggtgggaagacacaaagtgatgtggg

SEQ ID NO: 2905 - RNA, 26 nt, synthetic construct
  source 1..26: mol_type = other RNA
gtgggaagacacaaagtgatgtgggc

SEQ ID NO: 2906 - RNA, 26 nt, synthetic construct
  source 1..26: mol_type = other RNA
tgggaagacacaaagtgatgtgggca

SEQ ID NO: 2907 - RNA, 26 nt, synthetic construct
  source 1..26: mol_type = other RNA
gggaagacacaaagtgatgtgggcaa

SEQ ID NO: 2908 - RNA, 26 nt, synthetic construct
  source 1..26: mol_type = other RNA
ggaagacacaaagtgatgtgggcaag

SEQ ID NO: 2909 - RNA, 26 nt, synthetic construct
  source 1..26: mol_type = other RNA
gaagacacaaagtgatgtgggcaagt

SEQ ID NO: 2910 - RNA, 26 nt, synthetic construct
  source 1..26: mol_type = other RNA
aagacacaaagtgatgtgggcaagtg

SEQ ID NO: 2911 - RNA, 26 nt, synthetic construct
  source 1..26: mol_type = other RNA
agacacaaagtgatgtgggcaagtgc

SEQ ID NO: 2912 - RNA, 26 nt, synthetic construct
  source 1..26: mol_type = other RNA
gacacaaagtgatgtgggcaagtgcc

SEQ ID NO: 2913 - RNA, 26 nt, synthetic construct
  source 1..26: mol_type = other RNA
acacaaagtgatgtgggcaagtgcca

SEQ ID NO: 2914 - RNA, 26 nt, synthetic construct
  source 1..26: mol_type = other RNA
cacaaagtgatgtgggcaagtgccag

SEQ ID NO: 2915 - RNA, 26 nt, synthetic construct
  source 1..26: mol_type = other RNA
acaaagtgatgtgggcaagtgccagg

SEQ ID NO: 2916 - RNA, 26 nt, synthetic construct
  source 1..26: mol_type = other RNA
caaagtgatgtgggcaagtgccaggc

SEQ ID NO: 2917 - RNA, 26 nt, synthetic construct
  source 1..26: mol_type = other RNA
aaagtgatgtgggcaagtgccaggcc

SEQ ID NO: 2918 - RNA, 26 nt, synthetic construct
  source 1..26: mol_type = other RNA
aagtgatgtgggcaagtgccaggccc

SEQ ID NO: 2919 - RNA, 26 nt, synthetic construct
  source 1..26: mol_type = other RNA
agtgatgtgggcaagtgccaggccca

SEQ ID NO: 2920 - RNA, 26 nt, synthetic construct
  source 1..26: mol_type = other RNA
gtgatgtgggcaagtgccaggcccac

SEQ ID NO: 2921 - RNA, 26 nt, synthetic construct
  source 1..26: mol_type = other RNA
tgatgtgggcaagtgccaggcccaca

SEQ ID NO: 2922 - RNA, 26 nt, synthetic construct
  source 1..26: mol_type = other RNA
gatgtgggcaagtgccaggcccacat

SEQ ID NO: 2923 - RNA, 26 nt, synthetic construct
  source 1..26: mol_type = other RNA
atgtgggcaagtgccaggcccacatg

SEQ ID NO: 2924 - RNA, 26 nt, synthetic construct
  source 1..26: mol_type = other RNA
tgtgggcaagtgccaggcccacatgg

SEQ ID NO: 2925 - RNA, 26 nt, synthetic construct
  source 1..26: mol_type = other RNA
gtgggcaagtgccaggcccacatggt

SEQ ID NO: 2926 - RNA, 26 nt, synthetic construct
  source 1..26: mol_type = other RNA
tgggcaagtgccaggcccacatggta

SEQ ID NO: 2927 - RNA, 26 nt, synthetic construct
  source 1..26: mol_type = other RNA
gggcaagtgccaggcccacatggtaa

SEQ ID NO: 2928 - RNA, 26 nt, synthetic construct
  source 1..26: mol_type = other RNA
ggcaagtgccaggcccacatggtaag

SEQ ID NO: 2929 - RNA, 26 nt, synthetic construct
  source 1..26: mol_type = other RNA
gcaagtgccaggcccacatggtaagt

SEQ ID NO: 2930 - RNA, 26 nt, synthetic construct
  source 1..26: mol_type = other RNA
caagtgccaggcccacatggtaagta

SEQ ID NO: 2931 - RNA, 26 nt, synthetic construct
  source 1..26: mol_type = other RNA
aagtgccaggcccacatggtaagtac

SEQ ID NO: 2932 - RNA, 26 nt, synthetic construct
  source 1..26: mol_type = other RNA
agtgccaggcccacatggtaagtacc

SEQ ID NO: 2933 - RNA, 26 nt, synthetic construct
  source 1..26: mol_type = other RNA
gtgccaggcccacatggtaagtaccc

SEQ ID NO: 2934 - RNA, 26 nt, synthetic construct
  source 1..26: mol_type = other RNA
tgccaggcccacatggtaagtaccca

SEQ ID NO: 2935 - RNA, 26 nt, synthetic construct
  source 1..26: mol_type = other RNA
gccaggcccacatggtaagtacccaa

SEQ ID NO: 2936 - RNA, 26 nt, synthetic construct
  source 1..26: mol_type = other RNA
ccaggcccacatggtaagtacccaac

SEQ ID NO: 2937 - RNA, 26 nt, synthetic construct
  source 1..26: mol_type = other RNA
caggcccacatggtaagtacccaact

SEQ ID NO: 2938 - RNA, 26 nt, synthetic construct
  source 1..26: mol_type = other RNA
aggcccacatggtaagtacccaacta

SEQ ID NO: 2939 - RNA, 26 nt, synthetic construct
  source 1..26: mol_type = other RNA
ggcccacatggtaagtacccaactaa

SEQ ID NO: 2940 - RNA, 26 nt, synthetic construct
  source 1..26: mol_type = other RNA
gcccacatggtaagtacccaactaat

SEQ ID NO: 2941 - RNA, 26 nt, synthetic construct
  source 1..26: mol_type = other RNA
cccacatggtaagtacccaactaatc

SEQ ID NO: 2942 - RNA, 26 nt, synthetic construct
  source 1..26: mol_type = other RNA
ccacatggtaagtacccaactaatct

SEQ ID NO: 2943 - RNA, 26 nt, synthetic construct
  source 1..26: mol_type = other RNA
cacatggtaagtacccaactaatctc

SEQ ID NO: 2944 - RNA, 26 nt, synthetic construct
  source 1..26: mol_type = other RNA
acatggtaagtacccaactaatctcg

SEQ ID NO: 2945 - RNA, 26 nt, synthetic construct
  source 1..26: mol_type = other RNA
catggtaagtacccaactaatctcgc

SEQ ID NO: 2946 - RNA, 26 nt, synthetic construct
  source 1..26: mol_type = other RNA
atggtaagtacccaactaatctcgcc

SEQ ID NO: 2947 - RNA, 26 nt, synthetic construct
  source 1..26: mol_type = other RNA
tggtaagtacccaactaatctcgccc

SEQ ID NO: 2948 - RNA, 26 nt, synthetic construct
  source 1..26: mol_type = other RNA
ggtaagtacccaactaatctcgcccc

SEQ ID NO: 2949 - RNA, 26 nt, synthetic construct
  source 1..26: mol_type = other RNA
gtaagtacccaactaatctcgcccct

SEQ ID NO: 2950 - RNA, 26 nt, synthetic construct
  source 1..26: mol_type = other RNA
taagtacccaactaatctcgcccctc

SEQ ID NO: 2951 - RNA, 26 nt, synthetic construct
  source 1..26: mol_type = other RNA
aagtacccaactaatctcgcccctct

SEQ ID NO: 2952 - RNA, 26 nt, synthetic construct
  source 1..26: mol_type = other RNA
agtacccaactaatctcgcccctctc

SEQ ID NO: 2953 - RNA, 26 nt, synthetic construct
  source 1..26: mol_type = other RNA
gtacccaactaatctcgcccctctca

SEQ ID NO: 2954 - RNA, 26 nt, synthetic construct
  source 1..26: mol_type = other RNA
tacccaactaatctcgcccctctcag

SEQ ID NO: 2955 - RNA, 26 nt, synthetic construct
  source 1..26: mol_type = other RNA
acccaactaatctcgcccctctcagg

SEQ ID NO: 2956 - RNA, 26 nt, synthetic construct
  source 1..26: mol_type = other RNA
cccaactaatctcgcccctctcagga

SEQ ID NO: 2957 - RNA, 26 nt, synthetic construct
  source 1..26: mol_type = other RNA
ccaactaatctcgcccctctcaggac

SEQ ID NO: 2958 - RNA, 26 nt, synthetic construct
  source 1..26: mol_type = other RNA
caactaatctcgcccctctcaggacc

SEQ ID NO: 2959 - RNA, 26 nt, synthetic construct
  source 1..26: mol_type = other RNA
aactaatctcgcccctctcaggacct

SEQ ID NO: 2960 - RNA, 26 nt, synthetic construct
  source 1..26: mol_type = other RNA
actaatctcgcccctctcaggaccta

SEQ ID NO: 2961 - RNA, 26 nt, synthetic construct
  source 1..26: mol_type = other RNA
ctaatctcgcccctctcaggacctac

SEQ ID NO: 2962 - RNA, 20 nt, synthetic construct
  source 1..20: mol_type = other RNA
gctcttattctcctcctcct

SEQ ID NO: 2963 - RNA, 20 nt, synthetic construct
  source 1..20: mol_type = other RNA
tgctgccgttggctcttatt

SEQ ID NO: 2964 - RNA, 20 nt, synthetic construct
  source 1..20: mol_type = other RNA
tgccgctgctgccgttggct

SEQ ID NO: 2965 - RNA, 20 nt, synthetic construct
  source 1..20: mol_type = other RNA
tcggctgccgctgctgccgt

SEQ ID NO: 2966 - RNA, 20 nt, synthetic construct
  source 1..20: mol_type = other RNA
tctctctcggctgccgctgc

SEQ ID NO: 2967 - RNA, 20 nt, synthetic construct
  source 1..20: mol_type = other RNA
ccgccccccctctctctcgg

SEQ ID NO: 2968 - RNA, 20 nt, synthetic construct
  source 1..20: mol_type = other RNA
cgctcccccgccccccctct

SEQ ID NO: 2969 - RNA, 20 nt, synthetic construct
  source 1..20: mol_type = other RNA
gctctcgctcgctcccccgc

SEQ ID NO: 2970 - RNA, 20 nt, synthetic construct
  source 1..20: mol_type = other RNA
tcttcgctctcgctcgctcc

SEQ ID NO: 2971 - RNA, 20 nt, synthetic construct
  source 1..20: mol_type = other RNA
ctgctctcttcgctctcgct

SEQ ID NO: 2972 - RNA, 20 nt, synthetic construct
  source 1..20: mol_type = other RNA
tgcagagtctctccctcctc

SEQ ID NO: 2973 - RNA, 20 nt, synthetic construct
  source 1..20: mol_type = other RNA
gggggctgcagagtctctcc

SEQ ID NO: 2974 - RNA, 20 nt, synthetic construct
  source 1..20: mol_type = other RNA
ggggtgggggctgcagagtc

SEQ ID NO: 2975 - RNA, 20 nt, synthetic construct
  source 1..20: mol_type = other RNA
gagtaggggtgggggctgca

SEQ ID NO: 2976 - RNA, 20 nt, synthetic construct
  source 1..20: mol_type = other RNA
tcccggagtaggggtggggg

SEQ ID NO: 2977 - RNA, 20 nt, synthetic construct
  source 1..20: mol_type = other RNA
gggcctcccggagtaggggt

SEQ ID NO: 2978 - RNA, 20 nt, synthetic construct
  source 1..20: mol_type = other RNA
aatctgggcctcccggagta

SEQ ID NO: 2979 - RNA, 20 nt, synthetic construct
  source 1..20: mol_type = other RNA
ctctctcacaatctgggcct

SEQ ID NO: 2980 - RNA, 20 nt, synthetic construct
  source 1..20: mol_type = other RNA
gtgtttttgagtcaggggtc

SEQ ID NO: 2981 - RNA, 20 nt, synthetic construct
  source 1..20: mol_type = other RNA
ggggtctgcatctttaggac

SEQ ID NO: 2982 - RNA, 20 nt, synthetic construct
  source 1..20: mol_type = other RNA
cagggtctggggtctgcatc

SEQ ID NO: 2983 - RNA, 20 nt, synthetic construct
  source 1..20: mol_type = other RNA
tgtctcagggtctggggtct

SEQ ID NO: 2984 - RNA, 20 nt, synthetic construct
  source 1..20: mol_type = other RNA
ggtctctctgtctcagggtc

SEQ ID NO: 2985 - RNA, 20 nt, synthetic construct
  source 1..20: mol_type = other RNA
tatctttctctgtgggtcta

SEQ ID NO: 2986 - RNA, 20 nt, synthetic construct
  source 1..20: mol_type = other RNA
tggggggtggtgaagtatct

SEQ ID NO: 2987 - RNA, 20 nt, synthetic construct
  source 1..20: mol_type = other RNA
ccacagtggggggtggtgaa

SEQ ID NO: 2988 - RNA, 20 nt, synthetic construct
  source 1..20: mol_type = other RNA
attaccccacagtggggggt

SEQ ID NO: 2989 - RNA, 20 nt, synthetic construct
  source 1..20: mol_type = other RNA
tagattttggccctgtgtct

SEQ ID NO: 2990 - RNA, 20 nt, synthetic construct
  source 1..20: mol_type = other RNA
ggagtctcttttcctctaga

SEQ ID NO: 2991 - RNA, 20 nt, synthetic construct
  source 1..20: mol_type = other RNA
ctcaaatcaggagtctcttt

SEQ ID NO: 2992 - RNA, 20 nt, synthetic construct
  source 1..20: mol_type = other RNA
ttttcctcaaatcaggagtc

SEQ ID NO: 2993 - RNA, 20 nt, synthetic construct
  source 1..20: mol_type = other RNA
gggtcgttttttcctcaaat

SEQ ID NO: 2994 - RNA, 20 nt, synthetic construct
  source 1..20: mol_type = other RNA
ggatctggggtcgttttttc

SEQ ID NO: 2995 - RNA, 20 nt, synthetic construct
  source 1..20: mol_type = other RNA
ctgggggatctggggtcgtt

SEQ ID NO: 2996 - RNA, 20 nt, synthetic construct
  source 1..20: mol_type = other RNA
tctctctgggggatctgggg

SEQ ID NO: 2997 - RNA, 20 nt, synthetic construct
  source 1..20: mol_type = other RNA
gcttctctctctgggggatc

SEQ ID NO: 2998 - RNA, 20 nt, synthetic construct
  source 1..20: mol_type = other RNA
attttgatattgagcttctc

SEQ ID NO: 2999 - RNA, 20 nt, synthetic construct
  source 1..20: mol_type = other RNA
ttcagattttgatattgagc

SEQ ID NO: 3000 - RNA, 20 nt, synthetic construct
  source 1..20: mol_type = other RNA
gactggattttcagattttg

SEQ ID NO: 3001 - RNA, 20 nt, synthetic construct
  source 1..20: mol_type = other RNA
cctttttagactggattttc

SEQ ID NO: 3002 - RNA, 20 nt, synthetic construct
  source 1..20: mol_type = other RNA
agggtctggagtctaagata

SEQ ID NO: 3003 - RNA, 20 nt, synthetic construct
  source 1..20: mol_type = other RNA
atctcagggtctggagtcta

SEQ ID NO: 3004 - RNA, 20 nt, synthetic construct
  source 1..20: mol_type = other RNA
tcatcatctcagggtctgga

SEQ ID NO: 3005 - RNA, 20 nt, synthetic construct
  source 1..20: mol_type = other RNA
tgaaatcatcatctcagggt

SEQ ID NO: 3006 - RNA, 20 nt, synthetic construct
  source 1..20: mol_type = other RNA
tggtccctgaaatcatcatc

SEQ ID NO: 3007 - RNA, 20 nt, synthetic construct
  source 1..20: mol_type = other RNA
ggtcctggtccctgaaatca

SEQ ID NO: 3008 - RNA, 20 nt, synthetic construct
  source 1..20: mol_type = other RNA
aggtctcaggtcctggtccc

SEQ ID NO: 3009 - RNA, 20 nt, synthetic construct
  source 1..20: mol_type = other RNA
agtctaggtctcaggtcctg

SEQ ID NO: 3010 - RNA, 20 nt, synthetic construct
  source 1..20: mol_type = other RNA
ttctgagtctaggtctcagg

SEQ ID NO: 3011 - RNA, 20 nt, synthetic construct
  source 1..20: mol_type = other RNA
catctttttctgagtctagg

SEQ ID NO: 3012 - RNA, 20 nt, synthetic construct
  source 1..20: mol_type = other RNA
gggcctcatctttttctgag

SEQ ID NO: 3013 - RNA, 20 nt, synthetic construct
  source 1..20: mol_type = other RNA
tctgaatctgggcctcatct

SEQ ID NO: 3014 - RNA, 20 nt, synthetic construct
  source 1..20: mol_type = other RNA
gctctttctgaatctgggcc

SEQ ID NO: 3015 - RNA, 20 nt, synthetic construct
  source 1..20: mol_type = other RNA
catctggctctttctgaatc

SEQ ID NO: 3016 - RNA, 20 nt, synthetic construct
  source 1..20: mol_type = other RNA
tctaattctacatctggctc

SEQ ID NO: 3017 - RNA, 20 nt, synthetic construct
  source 1..20: mol_type = other RNA
ctctaagctctaattctaca

SEQ ID NO: 3018 - RNA, 20 nt, synthetic construct
  source 1..20: mol_type = other RNA
gagttctctaagctctaatt

SEQ ID NO: 3019 - RNA, 20 nt, synthetic construct
  source 1..20: mol_type = other RNA
taggtctgagttctctaagc

SEQ ID NO: 3020 - RNA, 20 nt, synthetic construct
  source 1..20: mol_type = other RNA
ggggtctctttctaggtctg

SEQ ID NO: 3021 - RNA, 20 nt, synthetic construct
  source 1..20: mol_type = other RNA
agtctggggtctctttctag

SEQ ID NO: 3022 - RNA, 20 nt, synthetic construct
  source 1..20: mol_type = other RNA
atctgagtctggggtctctt

SEQ ID NO: 3023 - RNA, 20 nt, synthetic construct
  source 1..20: mol_type = other RNA
tctgagatctgagtctgggg

SEQ ID NO: 3024 - RNA, 20 nt, synthetic construct
  source 1..20: mol_type = other RNA
ctaagttatcagtctctgag

SEQ ID NO: 3025 - RNA, 20 nt, synthetic construct
  source 1..20: mol_type = other RNA
ctgtctctaagttatcagtc

SEQ ID NO: 3026 - RNA, 20 nt, synthetic construct
  source 1..20: mol_type = other RNA
gtgtctctgtctctaagtta

SEQ ID NO: 3027 - RNA, 20 nt, synthetic construct
  source 1..20: mol_type = other RNA
caggagtgtctctgtctcta

SEQ ID NO: 3028 - RNA, 20 nt, synthetic construct
  source 1..20: mol_type = other RNA
ccccttaagtcaggagtgtc

SEQ ID NO: 3029 - RNA, 20 nt, synthetic construct
  source 1..20: mol_type = other RNA
tctatctccccttaagtcag

SEQ ID NO: 3030 - RNA, 20 nt, synthetic construct
  source 1..20: mol_type = other RNA
gaagtctctatctcccctta

SEQ ID NO: 3031 - RNA, 20 nt, synthetic construct
  source 1..20: mol_type = other RNA
cagctgaagtctctatctcc

SEQ ID NO: 3032 - RNA, 20 nt, synthetic construct
  source 1..20: mol_type = other RNA
cggaccagctgaagtctcta

SEQ ID NO: 3033 - RNA, 20 nt, synthetic construct
  source 1..20: mol_type = other RNA
ccatctccggaccagctgaa

SEQ ID NO: 3034 - RNA, 20 nt, synthetic construct
  source 1..20: mol_type = other RNA
gagttgtccatctccggacc

SEQ ID NO: 3035 - RNA, 20 nt, synthetic construct
  source 1..20: mol_type = other RNA
tttgggtctctgagttgtcc

SEQ ID NO: 3036 - RNA, 20 nt, synthetic construct
  source 1..20: mol_type = other RNA
atgaattttgggtctctgag

SEQ ID NO: 3037 - RNA, 20 nt, synthetic construct
  source 1..20: mol_type = other RNA
ttcttcatgaattttgggtc

SEQ ID NO: 3038 - RNA, 20 nt, synthetic construct
  source 1..20: mol_type = other RNA
tcgaagtcttcttcatgaat

SEQ ID NO: 3039 - RNA, 20 nt, synthetic construct
  source 1..20: mol_type = other RNA
gtctttcgaagtcttcttca

SEQ ID NO: 3040 - RNA, 20 nt, synthetic construct
  source 1..20: mol_type = other RNA
tctgaggtctttcgaagtct

SEQ ID NO: 3041 - RNA, 20 nt, synthetic construct
  source 1..20: mol_type = other RNA
tcgcactctgaggtctttcg

SEQ ID NO: 3042 - RNA, 20 nt, synthetic construct
  source 1..20: mol_type = other RNA
ctgtggtcgcactctgaggt

SEQ ID NO: 3043 - RNA, 20 nt, synthetic construct
  source 1..20: mol_type = other RNA
cagggtctgtggtcgcactc

SEQ ID NO: 3044 - RNA, 20 nt, synthetic construct
  source 1..20: mol_type = other RNA
tgtttcagggtctgtggtcg

SEQ ID NO: 3045 - RNA, 20 nt, synthetic construct
  source 1..20: mol_type = other RNA
tttctatgtttcagggtctg

SEQ ID NO: 3046 - RNA, 20 nt, synthetic construct
  source 1..20: mol_type = other RNA
gggggtttctatgtttcagg

SEQ ID NO: 3047 - RNA, 20 nt, synthetic construct
  source 1..20: mol_type = other RNA
ctggtttggggggtttctat

SEQ ID NO: 3048 - RNA, 20 nt, synthetic construct
  source 1..20: mol_type = other RNA
tatgcttctggtttgggggg

SEQ ID NO: 3049 - RNA, 20 nt, synthetic construct
  source 1..20: mol_type = other RNA
gtttccttttatgcttctgg

SEQ ID NO: 3050 - RNA, 20 nt, synthetic construct
  source 1..20: mol_type = other RNA
gattgagtttccttttatgc

SEQ ID NO: 3051 - RNA, 20 nt, synthetic construct
  source 1..20: mol_type = other RNA
tcttaggattgagtttcctt

SEQ ID NO: 3052 - RNA, 20 nt, synthetic construct
  source 1..20: mol_type = other RNA
gatctttcttaggattgagt

SEQ ID NO: 3053 - RNA, 20 nt, synthetic construct
  source 1..20: mol_type = other RNA
gtggagatctttcttaggat

SEQ ID NO: 3054 - RNA, 20 nt, synthetic construct
  source 1..20: mol_type = other RNA
tttgtgtggagatctttctt

SEQ ID NO: 3055 - RNA, 20 nt, synthetic construct
  source 1..20: mol_type = other RNA
tcagtatttgtgtggagatc

SEQ ID NO: 3056 - RNA, 20 nt, synthetic construct
  source 1..20: mol_type = other RNA
gtctttcagtatttgtgtgg

SEQ ID NO: 3057 - RNA, 20 nt, synthetic construct
  source 1..20: mol_type = other RNA
cggaggggtctttcagtatt

SEQ ID NO: 3058 - RNA, 20 nt, synthetic construct
  source 1..20: mol_type = other RNA
gatttcggaggggtctttca

SEQ ID NO: 3059 - RNA, 20 nt, synthetic construct
  source 1..20: mol_type = other RNA
gagacagatttcggaggggt

SEQ ID NO: 3060 - RNA, 20 nt, synthetic construct
  source 1..20: mol_type = other RNA
tctctgagacagatttcgga

SEQ ID NO: 3061 - RNA, 20 nt, synthetic construct
  source 1..20: mol_type = other RNA
ttggagtttgtctctgagac

SEQ ID NO: 3062 - RNA, 20 nt, synthetic construct
  source 1..20: mol_type = other RNA
ttgagtttggagtttgtctc

SEQ ID NO: 3063 - RNA, 20 nt, synthetic construct
  source 1..20: mol_type = other RNA
ctgtctttgagtttggagtt

SEQ ID NO: 3064 - RNA, 20 nt, synthetic construct
  source 1..20: mol_type = other RNA
gagatctctgtctttgagtt

SEQ ID NO: 3065 - RNA, 20 nt, synthetic construct
  source 1..20: mol_type = other RNA
gttccctgagatctctgtct

SEQ ID NO: 3066 - RNA, 20 nt, synthetic construct
  source 1..20: mol_type = other RNA
gggaggttccctgagatctc

SEQ ID NO: 3067 - RNA, 20 nt, synthetic construct
  source 1..20: mol_type = other RNA
gggaggggaggttccctgag

SEQ ID NO: 3068 - RNA, 20 nt, synthetic construct
  source 1..20: mol_type = other RNA
aagtggggaggggaggttcc

SEQ ID NO: 3069 - RNA, 20 nt, synthetic construct
  source 1..20: mol_type = other RNA
ggttctagggcagggaagtg

SEQ ID NO: 3070 - RNA, 20 nt, synthetic construct
  source 1..20: mol_type = other RNA
tctcggaggttctagggcag

SEQ ID NO: 3071 - RNA, 20 nt, synthetic construct
  source 1..20: mol_type = other RNA
gttatacctctcggaggttc

SEQ ID NO: 3072 - RNA, 20 nt, synthetic construct
  source 1..20: mol_type = other RNA
gtcagggttatacctctcgg

SEQ ID NO: 3073 - RNA, 20 nt, synthetic construct
  source 1..20: mol_type = other RNA
ggctgacgtcagggttatac

SEQ ID NO: 3074 - RNA, 20 nt, synthetic construct
  source 1..20: mol_type = other RNA
tcccaggctgacgtcagggt

SEQ ID NO: 3075 - RNA, 20 nt, synthetic construct
  source 1..20: mol_type = other RNA
tcggagtttcccaggctgac

SEQ ID NO: 3076 - RNA, 20 nt, synthetic construct
  source 1..20: mol_type = other RNA
gatgcctcggagtttcccag

SEQ ID NO: 3077 - RNA, 20 nt, synthetic construct
  source 1..20: mol_type = other RNA
ggtggggatgcctcggagtt

SEQ ID NO: 3078 - RNA, 20 nt, synthetic construct
  source 1..20: mol_type = other RNA
ctggtggtggggatgcctcg

SEQ ID NO: 3079 - RNA, 20 nt, synthetic construct
  source 1..20: mol_type = other RNA
attggtctggtggtggggat

SEQ ID NO: 3080 - RNA, 20 nt, synthetic construct
  source 1..20: mol_type = other RNA
gaggtcattggtctggtggt

SEQ ID NO: 3081 - RNA, 20 nt, synthetic construct
  source 1..20: mol_type = other RNA
aggtctgaggtcattggtct

SEQ ID NO: 3082 - RNA, 20 nt, synthetic construct
  source 1..20: mol_type = other RNA
ccttcaaggtctgaggtcat

SEQ ID NO: 3083 - RNA, 20 nt, synthetic construct
  source 1..20: mol_type = other RNA
tcccctcccttcaaggtctg

SEQ ID NO: 3084 - RNA, 18 nt, synthetic construct
  source 1..18: mol_type = other RNA
ggtctggagtctaagata

SEQ ID NO: 3085 - RNA, 18 nt, synthetic construct
  source 1..18: mol_type = other RNA
agtctaagatatctgtag

SEQ ID NO: 3086 - RNA, 18 nt, synthetic construct
  source 1..18: mol_type = other RNA
gtctaagatatctgtagg

SEQ ID NO: 3087 - RNA, 18 nt, synthetic construct
  source 1..18: mol_type = other RNA
aagatatctgtaggtatg

SEQ ID NO: 3088 - RNA, 18 nt, synthetic construct
  source 1..18: mol_type = other RNA
atatctgtaggtatggag

SEQ ID NO: 3089 - RNA, 18 nt, synthetic construct
  source 1..18: mol_type = other RNA
tgtaggtatggagaaccc

SEQ ID NO: 3090 - RNA, 18 nt, synthetic construct
  source 1..18: mol_type = other RNA
gtatggagaacccttttt

SEQ ID NO: 3091 - RNA, 18 nt, synthetic construct
  source 1..18: mol_type = other RNA
gggggatctggggtcgtt

SEQ ID NO: 3092 - RNA, 18 nt, synthetic construct
  source 1..18: mol_type = other RNA
ggggatctggggtcgttt

SEQ ID NO: 3093 - RNA, 18 nt, synthetic construct
  source 1..18: mol_type = other RNA
gggatctggggtcgtttt

SEQ ID NO: 3094 - RNA, 18 nt, synthetic construct
  source 1..18: mol_type = other RNA
ggatctggggtcgttttt

SEQ ID NO: 3095 - RNA, 18 nt, synthetic construct
  source 1..18: mol_type = other RNA
gatctggggtcgtttttt

SEQ ID NO: 3096 - RNA, 18 nt, synthetic construct
  source 1..18: mol_type = other RNA
atctggggtcgttttttc

SEQ ID NO: 3097 - RNA, 18 nt, synthetic construct
  source 1..18: mol_type = other RNA
ggtcgttttttcctcaaa

SEQ ID NO: 3098 - RNA, 18 nt, synthetic construct
  source 1..18: mol_type = other RNA
tcgttttttcctcaaatc

SEQ ID NO: 3099 - RNA, 18 nt, synthetic construct
  source 1..18: mol_type = other RNA
tttcctcaaatcaggagt

SEQ ID NO: 3100 - RNA, 18 nt, synthetic construct
  source 1..18: mol_type = other RNA
cctctagattttggccct

SEQ ID NO: 3101 - RNA, 18 nt, synthetic construct
  source 1..18: mol_type = other RNA
tagattttggccctgtgt

SEQ ID NO: 3102 - RNA, 18 nt, synthetic construct
  source 1..18: mol_type = other RNA
agattttggccctgtgtc

SEQ ID NO: 3103 - RNA, 18 nt, synthetic construct
  source 1..18: mol_type = other RNA
cctgtgtctcaaattacc

SEQ ID NO: 3104 - RNA, 18 nt, synthetic construct
  source 1..18: mol_type = other RNA
gtgtctcaaattacccca

SEQ ID NO: 3105 - RNA, 18 nt, synthetic construct
  source 1..18: mol_type = other RNA
gtctcaaattaccccaca

SEQ ID NO: 3106 - RNA, 18 nt, synthetic construct
  source 1..18: mol_type = other RNA
aaattaccccacagtggg

SEQ ID NO: 3107 - RNA, 18 nt, synthetic construct
  source 1..18: mol_type = other RNA
taccccacagtggggggt

SEQ ID NO: 3108 - RNA, 18 nt, synthetic construct
  source 1..18: mol_type = other RNA
ggggggtggtgaagtatc

SEQ ID NO: 3109 - RNA, 18 nt, synthetic construct
  source 1..18: mol_type = other RNA
gggggtggtgaagtatct

SEQ ID NO: 3110 - RNA, 18 nt, synthetic construct
  source 1..18: mol_type = other RNA
ggggtggtgaagtatctt

SEQ ID NO: 3111 - RNA, 18 nt, synthetic construct
  source 1..18: mol_type = other RNA
gggtggtgaagtatcttt

SEQ ID NO: 3112 - RNA, 18 nt, synthetic construct
  source 1..18: mol_type = other RNA
ggtggtgaagtatctttc

SEQ ID NO: 3113 - RNA, 18 nt, synthetic construct
  source 1..18: mol_type = other RNA
ggtgaagtatctttctct

SEQ ID NO: 3114 - RNA, 18 nt, synthetic construct
  source 1..18: mol_type = other RNA
tctgtgggtctagggtct

SEQ ID NO: 3115 - RNA, 18 nt, synthetic construct
  source 1..18: mol_type = other RNA
ctgtgggtctagggtctc

SEQ ID NO: 3116 - RNA, 18 nt, synthetic construct
  source 1..18: mol_type = other RNA
tgtgggtctagggtctct

SEQ ID NO: 3117 - RNA, 18 nt, synthetic construct
  source 1..18: mol_type = other RNA
gtctagggtctctctgtc

SEQ ID NO: 3118 - RNA, 18 nt, synthetic construct
  source 1..18: mol_type = other RNA
tctagggtctctctgtct

SEQ ID NO: 3119 - RNA, 18 nt, synthetic construct
  source 1..18: mol_type = other RNA
gggtctgcatctttagga

SEQ ID NO: 3120 - RNA, 18 nt, synthetic construct
  source 1..18: mol_type = other RNA
ggtctgcatctttaggac

SEQ ID NO: 3121 - RNA, 19 nt, synthetic construct
  source 1..19: mol_type = other RNA
gggtctggagtctaagata

SEQ ID NO: 3122 - RNA, 19 nt, synthetic construct
  source 1..19: mol_type = other RNA
ggtctggagtctaagatat

SEQ ID NO: 3123 - RNA, 19 nt, synthetic construct
  source 1..19: mol_type = other RNA
gtctggagtctaagatatc

SEQ ID NO: 3124 - RNA, 19 nt, synthetic construct
  source 1..19: mol_type = other RNA
gagtctaagatatctgtag

SEQ ID NO: 3125 - RNA, 19 nt, synthetic construct
  source 1..19: mol_type = other RNA
agtctaagatatctgtagg

SEQ ID NO: 3126 - RNA, 19 nt, synthetic construct
  source 1..19: mol_type = other RNA
gtctaagatatctgtaggt

SEQ ID NO: 3127 - RNA, 19 nt, synthetic construct
  source 1..19: mol_type = other RNA
tctaagatatctgtaggta

SEQ ID NO: 3128 - RNA, 19 nt, synthetic construct
  source 1..19: mol_type = other RNA
taagatatctgtaggtatg

SEQ ID NO: 3129 - RNA, 19 nt, synthetic construct
  source 1..19: mol_type = other RNA
aagatatctgtaggtatgg

SEQ ID NO: 3130 - RNA, 19 nt, synthetic construct
  source 1..19: mol_type = other RNA
gatatctgtaggtatggag

SEQ ID NO: 3131 - RNA, 19 nt, synthetic construct
  source 1..19: mol_type = other RNA
atatctgtaggtatggaga

SEQ ID NO: 3132 - RNA, 19 nt, synthetic construct
  source 1..19: mol_type = other RNA
ctgtaggtatggagaaccc

SEQ ID NO: 3133 - RNA, 19 nt, synthetic construct
  source 1..19: mol_type = other RNA
tgtaggtatggagaaccct

SEQ ID NO: 3134 - RNA, 19 nt, synthetic construct
  source 1..19: mol_type = other RNA
ggtatggagaacccttttt

SEQ ID NO: 3135 - RNA, 19 nt, synthetic construct
  source 1..19: mol_type = other RNA
gtatggagaacccttttta

SEQ ID NO: 3136 - RNA, 19 nt, synthetic construct
  source 1..19: mol_type = other RNA
tggagaaccctttttagac

SEQ ID NO: 3137 - RNA, 19 nt, synthetic construct
  source 1..19: mol_type = other RNA
gagaaccctttttagactg

SEQ ID NO: 3138 - RNA, 19 nt, synthetic construct
  source 1..19: mol_type = other RNA
agaaccctttttagactgg

SEQ ID NO: 3139 - RNA, 19 nt, synthetic construct
  source 1..19: mol_type = other RNA
gaaccctttttagactgga

SEQ ID NO: 3140 - RNA, 19 nt, synthetic construct
  source 1..19: mol_type = other RNA
aaccctttttagactggat

SEQ ID NO: 3141 - RNA, 19 nt, synthetic construct
  source 1..19: mol_type = other RNA
ccctttttagactggattt

SEQ ID NO: 3142 - RNA, 19 nt, synthetic construct
  source 1..19: mol_type = other RNA
tttttagactggattttca

SEQ ID NO: 3143 - RNA, 19 nt, synthetic construct
  source 1..19: mol_type = other RNA
ttagactggattttcagat

SEQ ID NO: 3144 - RNA, 19 nt, synthetic construct
  source 1..19: mol_type = other RNA
tagactggattttcagatt

SEQ ID NO: 3145 - RNA, 19 nt, synthetic construct
  source 1..19: mol_type = other RNA
gactggattttcagatttt

SEQ ID NO: 3146 - RNA, 19 nt, synthetic construct
  source 1..19: mol_type = other RNA
actggattttcagattttg

SEQ ID NO: 3147 - RNA, 19 nt, synthetic construct
  source 1..19: mol_type = other RNA
tcagattttgatattgagc

SEQ ID NO: 3148 - RNA, 19 nt, synthetic construct
  source 1..19: mol_type = other RNA
gattttgatattgagcttc

SEQ ID NO: 3149 - RNA, 19 nt, synthetic construct
  source 1..19: mol_type = other RNA
ttttgatattgagcttctc

SEQ ID NO: 3150 - RNA, 19 nt, synthetic construct
  source 1..19: mol_type = other RNA
ttgatattgagcttctctc

SEQ ID NO: 3151 - RNA, 19 nt, synthetic construct
  source 1..19: mol_type = other RNA
tgatattgagcttctctct

SEQ ID NO: 3152 - RNA, 19 nt, synthetic construct
  source 1..19: mol_type = other RNA
gatattgagcttctctctc

SEQ ID NO: 3153 - RNA, 19 nt, synthetic construct
  source 1..19: mol_type = other RNA
agcttctctctctggggga

SEQ ID NO: 3154 - RNA, 19 nt, synthetic construct
  source 1..19: mol_type = other RNA
cttctctctctgggggatc

SEQ ID NO: 3155 - RNA, 19 nt, synthetic construct
  source 1..19: mol_type = other RNA
ctctctctgggggatctgg

SEQ ID NO: 3156 - RNA, 19 nt, synthetic construct
  source 1..19: mol_type = other RNA
tctctctgggggatctggg

SEQ ID NO: 3157 - RNA, 19 nt, synthetic construct
  source 1..19: mol_type = other RNA
ctgggggatctggggtcgt

SEQ ID NO: 3158 - RNA, 19 nt, synthetic construct
  source 1..19: mol_type = other RNA
tgggggatctggggtcgtt

SEQ ID NO: 3159 - RNA, 19 nt, synthetic construct
  source 1..19: mol_type = other RNA
gggggatctggggtcgttt

SEQ ID NO: 3160 - RNA, 19 nt, synthetic construct
  source 1..19: mol_type = other RNA
ggggatctggggtcgtttt

SEQ ID NO: 3161 - RNA, 19 nt, synthetic construct
  source 1..19: mol_type = other RNA
gggatctggggtcgttttt

SEQ ID NO: 3162 - RNA, 19 nt, synthetic construct
  source 1..19: mol_type = other RNA
ggatctggggtcgtttttt

SEQ ID NO: 3163 - RNA, 19 nt, synthetic construct
  source 1..19: mol_type = other RNA
gatctggggtcgttttttc

SEQ ID NO: 3164 - RNA, 19 nt, synthetic construct
  source 1..19: mol_type = other RNA
atctggggtcgttttttcc

SEQ ID NO: 3165 - RNA, 19 nt, synthetic construct
  source 1..19: mol_type = other RNA
tctggggtcgttttttcct

SEQ ID NO: 3166 - RNA, 19 nt, synthetic construct
  source 1..19: mol_type = other RNA
gggtcgttttttcctcaaa

SEQ ID NO: 3167 - RNA, 19 nt, synthetic construct
  source 1..19: mol_type = other RNA
ggtcgttttttcctcaaat

SEQ ID NO: 3168 - RNA, 19 nt, synthetic construct
  source 1..19: mol_type = other RNA
gtcgttttttcctcaaatc

SEQ ID NO: 3169 - RNA, 19 nt, synthetic construct
  source 1..19: mol_type = other RNA
tcgttttttcctcaaatca

SEQ ID NO: 3170 - RNA, 19 nt, synthetic construct
  source 1..19: mol_type = other RNA
cgttttttcctcaaatcag

SEQ ID NO: 3171 - RNA, 19 nt, synthetic construct
  source 1..19: mol_type = other RNA
ttttcctcaaatcaggagt

SEQ ID NO: 3172 - RNA, 19 nt, synthetic construct
  source 1..19: mol_type = other RNA
tttcctcaaatcaggagtc

SEQ ID NO: 3173 - RNA, 19 nt, synthetic construct
  source 1..19: mol_type = other RNA
ctcaaatcaggagtctctt

SEQ ID NO: 3174 - RNA, 19 nt, synthetic construct
  source 1..19: mol_type = other RNA
gagtctcttttcctctaga

SEQ ID NO: 3175 - RNA, 19 nt, synthetic construct
  source 1..19: mol_type = other RNA
ttttcctctagattttggc

SEQ ID NO: 3176 - RNA, 19 nt, synthetic construct
  source 1..19: mol_type = other RNA
tcctctagattttggccct

SEQ ID NO: 3177 - RNA, 19 nt, synthetic construct
  source 1..19: mol_type = other RNA
cctctagattttggccctg

SEQ ID NO: 3178 - RNA, 19 nt, synthetic construct
  source 1..19: mol_type = other RNA
ctctagattttggccctgt

SEQ ID NO: 3179 - RNA, 19 nt, synthetic construct
  source 1..19: mol_type = other RNA
tctagattttggccctgtg

SEQ ID NO: 3180 - RNA, 19 nt, synthetic construct
  source 1..19: mol_type = other RNA
ctagattttggccctgtgt

SEQ ID NO: 3181 - RNA, 19 nt, synthetic construct
  source 1..19: mol_type = other RNA
tagattttggccctgtgtc

SEQ ID NO: 3182 - RNA, 19 nt, synthetic construct
  source 1..19: mol_type = other RNA
agattttggccctgtgtct

SEQ ID NO: 3183 - RNA, 19 nt, synthetic construct
  source 1..19: mol_type = other RNA
gattttggccctgtgtctc

SEQ ID NO: 3184 - RNA, 19 nt, synthetic construct
  source 1..19: mol_type = other RNA
attttggccctgtgtctca

SEQ ID NO: 3185 - RNA, 19 nt, synthetic construct
  source 1..19: mol_type = other RNA
tttggccctgtgtctcaaa

SEQ ID NO: 3186 - RNA, 19 nt, synthetic construct
  source 1..19: mol_type = other RNA
ttggccctgtgtctcaaat

SEQ ID NO: 3187 - RNA, 19 nt, synthetic construct
  source 1..19: mol_type = other RNA
gccctgtgtctcaaattac

SEQ ID NO: 3188 - RNA, 19 nt, synthetic construct
  source 1..19: mol_type = other RNA
ccctgtgtctcaaattacc

SEQ ID NO: 3189 - RNA, 19 nt, synthetic construct
  source 1..19: mol_type = other RNA
cctgtgtctcaaattaccc

SEQ ID NO: 3190 - RNA, 19 nt, synthetic construct
  source 1..19: mol_type = other RNA
tgtgtctcaaattacccca

SEQ ID NO: 3191 - RNA, 19 nt, synthetic construct
  source 1..19: mol_type = other RNA
gtgtctcaaattaccccac

SEQ ID NO: 3192 - RNA, 19 nt, synthetic construct
  source 1..19: mol_type = other RNA
tgtctcaaattaccccaca

SEQ ID NO: 3193 - RNA, 19 nt, synthetic construct
  source 1..19: mol_type = other RNA
gtctcaaattaccccacag

SEQ ID NO: 3194 - RNA, 19 nt, synthetic construct
  source 1..19: mol_type = other RNA
tctcaaattaccccacagt

SEQ ID NO: 3195 - RNA, 19 nt, synthetic construct
  source 1..19: mol_type = other RNA
tcaaattaccccacagtgg

SEQ ID NO: 3196 - RNA, 19 nt, synthetic construct
  source 1..19: mol_type = other RNA
caaattaccccacagtggg

SEQ ID NO: 3197 - RNA, 19 nt, synthetic construct
  source 1..19: mol_type = other RNA
aaattaccccacagtgggg

SEQ ID NO: 3198 - RNA, 19 nt, synthetic construct
  source 1..19: mol_type = other RNA
attaccccacagtgggggg

SEQ ID NO: 3199 - RNA, 19 nt, synthetic construct
  source 1..19: mol_type = other RNA
ttaccccacagtggggggt

SEQ ID NO: 3200 - RNA, 19 nt, synthetic construct
  source 1..19: mol_type = other RNA
taccccacagtggggggtg

SEQ ID NO: 3201 - RNA, 19 nt, synthetic construct
  source 1..19: mol_type = other RNA
accccacagtggggggtgg

SEQ ID NO: 3202 - RNA, 19 nt, synthetic construct
  source 1..19: mol_type = other RNA
ccccacagtggggggtggt

SEQ ID NO: 3203 - RNA, 19 nt, synthetic construct
  source 1..19: mol_type = other RNA
cccacagtggggggtggtg

SEQ ID NO: 3204 - RNA, 19 nt, synthetic construct
  source 1..19: mol_type = other RNA
cacagtggggggtggtgaa

SEQ ID NO: 3205 - RNA, 19 nt, synthetic construct
  source 1..19: mol_type = other RNA
gtggggggtggtgaagtat

SEQ ID NO: 3206 - RNA, 19 nt, synthetic construct
  source 1..19: mol_type = other RNA
tggggggtggtgaagtatc

SEQ ID NO: 3207 - RNA, 19 nt, synthetic construct
  source 1..19: mol_type = other RNA
ggggggtggtgaagtatct

SEQ ID NO: 3208 - RNA, 19 nt, synthetic construct
  source 1..19: mol_type = other RNA
gggggtggtgaagtatctt

SEQ ID NO: 3209 - RNA, 19 nt, synthetic construct
  source 1..19: mol_type = other RNA
ggggtggtgaagtatcttt

SEQ ID NO: 3210 - RNA, 19 nt, synthetic construct
  source 1..19: mol_type = other RNA
gggtggtgaagtatctttc

SEQ ID NO: 3211 - RNA, 19 nt, synthetic construct
  source 1..19: mol_type = other RNA
ggtggtgaagtatctttct

SEQ ID NO: 3212 - RNA, 19 nt, synthetic construct
  source 1..19: mol_type = other RNA
tggtgaagtatctttctct

SEQ ID NO: 3213 - RNA, 19 nt, synthetic construct
  source 1..19: mol_type = other RNA
ggtgaagtatctttctctg

SEQ ID NO: 3214 - RNA, 19 nt, synthetic construct
  source 1..19: mol_type = other RNA
ctttctctgtgggtctagg

SEQ ID NO: 3215 - RNA, 19 nt, synthetic construct
  source 1..19: mol_type = other RNA
ctctgtgggtctagggtct

SEQ ID NO: 3216 - RNA, 19 nt, synthetic construct
  source 1..19: mol_type = other RNA
tctgtgggtctagggtctc

SEQ ID NO: 3217 - RNA, 19 nt, synthetic construct
  source 1..19: mol_type = other RNA
ctgtgggtctagggtctct

SEQ ID NO: 3218 - RNA, 19 nt, synthetic construct
  source 1..19: mol_type = other RNA
tgtgggtctagggtctctc

SEQ ID NO: 3219 - RNA, 19 nt, synthetic construct
  source 1..19: mol_type = other RNA
gggtctagggtctctctgt

SEQ ID NO: 3220 - RNA, 19 nt, synthetic construct
  source 1..19: mol_type = other RNA
ggtctagggtctctctgtc

SEQ ID NO: 3221 - RNA, 19 nt, synthetic construct
  source 1..19: mol_type = other RNA
gtctagggtctctctgtct

SEQ ID NO: 3222 - RNA, 19 nt, synthetic construct
  source 1..19: mol_type = other RNA
tctagggtctctctgtctc

SEQ ID NO: 3223 - RNA, 19 nt, synthetic construct
  source 1..19: mol_type = other RNA
ctagggtctctctgtctca

SEQ ID NO: 3224 - RNA, 19 nt, synthetic construct
  source 1..19: mol_type = other RNA
gtctctctgtctcagggtc

SEQ ID NO: 3225 - RNA, 19 nt, synthetic construct
  source 1..19: mol_type = other RNA
ctgtctcagggtctggggt

SEQ ID NO: 3226 - RNA, 19 nt, synthetic construct
  source 1..19: mol_type = other RNA
tgtctcagggtctggggtc

SEQ ID NO: 3227 - RNA, 19 nt, synthetic construct
  source 1..19: mol_type = other RNA
tcagggtctggggtctgca

SEQ ID NO: 3228 - RNA, 19 nt, synthetic construct
  source 1..19: mol_type = other RNA
tctggggtctgcatcttta

SEQ ID NO: 3229 - RNA, 19 nt, synthetic construct
  source 1..19: mol_type = other RNA
ctggggtctgcatctttag

SEQ ID NO: 3230 - RNA, 19 nt, synthetic construct
  source 1..19: mol_type = other RNA
ggggtctgcatctttagga

SEQ ID NO: 3231 - RNA, 19 nt, synthetic construct
  source 1..19: mol_type = other RNA
gggtctgcatctttaggac

SEQ ID NO: 3232 - RNA, 19 nt, synthetic construct
  source 1..19: mol_type = other RNA
ggtctgcatctttaggacc

SEQ ID NO: 3233 - RNA, 19 nt, synthetic construct
  source 1..19: mol_type = other RNA
atctttaggacctctgtct

SEQ ID NO: 3234 - RNA, 20 nt, synthetic construct
  source 1..20: mol_type = other RNA
gggtctggagtctaagatat

SEQ ID NO: 3235 - RNA, 20 nt, synthetic construct
  source 1..20: mol_type = other RNA
ggtctggagtctaagatatc

SEQ ID NO: 3236 - RNA, 20 nt, synthetic construct
  source 1..20: mol_type = other RNA
gtctggagtctaagatatct

SEQ ID NO: 3237 - RNA, 20 nt, synthetic construct
  source 1..20: mol_type = other RNA
tctggagtctaagatatctg

SEQ ID NO: 3238 - RNA, 20 nt, synthetic construct
  source 1..20: mol_type = other RNA
ctggagtctaagatatctgt

SEQ ID NO: 3239 - RNA, 20 nt, synthetic construct
  source 1..20: mol_type = other RNA
tggagtctaagatatctgta

SEQ ID NO: 3240 - RNA, 20 nt, synthetic construct
  source 1..20: mol_type = other RNA
ggagtctaagatatctgtag

SEQ ID NO: 3241 - RNA, 20 nt, synthetic construct
  source 1..20: mol_type = other RNA
gagtctaagatatctgtagg

SEQ ID NO: 3242 - RNA, 20 nt, synthetic construct
  source 1..20: mol_type = other RNA
agtctaagatatctgtaggt

SEQ ID NO: 3243 - RNA, 20 nt, synthetic construct
  source 1..20: mol_type = other RNA
gtctaagatatctgtaggta

SEQ ID NO: 3244 - RNA, 20 nt, synthetic construct
  source 1..20: mol_type = other RNA
tctaagatatctgtaggtat

SEQ ID NO: 3245 - RNA, 20 nt, synthetic construct
  source 1..20: mol_type = other RNA
ctaagatatctgtaggtatg

SEQ ID NO: 3246 - RNA, 20 nt, synthetic construct
  source 1..20: mol_type = other RNA
taagatatctgtaggtatgg

SEQ ID NO: 3247 - RNA, 20 nt, synthetic construct
  source 1..20: mol_type = other RNA
aagatatctgtaggtatgga

SEQ ID NO: 3248 - RNA, 20 nt, synthetic construct
  source 1..20: mol_type = other RNA
agatatctgtaggtatggag

SEQ ID NO: 3249 - RNA, 20 nt, synthetic construct
  source 1..20: mol_type = other RNA
gatatctgtaggtatggaga

SEQ ID NO: 3250 - RNA, 20 nt, synthetic construct
  source 1..20: mol_type = other RNA
atatctgtaggtatggagaa

SEQ ID NO: 3251 - RNA, 20 nt, synthetic construct
  source 1..20: mol_type = other RNA
tctgtaggtatggagaaccc

SEQ ID NO: 3252 - RNA, 20 nt, synthetic construct
  source 1..20: mol_type = other RNA
ctgtaggtatggagaaccct

SEQ ID NO: 3253 - RNA, 20 nt, synthetic construct
  source 1..20: mol_type = other RNA
tgtaggtatggagaaccctt

SEQ ID NO: 3254 - RNA, 20 nt, synthetic construct
  source 1..20: mol_type = other RNA
gtaggtatggagaacccttt

SEQ ID NO: 3255 - RNA, 20 nt, synthetic construct
  source 1..20: mol_type = other RNA
aggtatggagaacccttttt

SEQ ID NO: 3256 - RNA, 20 nt, synthetic construct
  source 1..20: mol_type = other RNA
ggtatggagaacccttttta

SEQ ID NO: 3257 - RNA, 20 nt, synthetic construct
  source 1..20: mol_type = other RNA
gtatggagaaccctttttag

SEQ ID NO: 3258 - RNA, 20 nt, synthetic construct
  source 1..20: mol_type = other RNA
tatggagaaccctttttaga

SEQ ID NO: 3259 - RNA, 20 nt, synthetic construct
  source 1..20: mol_type = other RNA
atggagaaccctttttagac

SEQ ID NO: 3260 - RNA, 20 nt, synthetic construct
  source 1..20: mol_type = other RNA
tggagaaccctttttagact

SEQ ID NO: 3261 - RNA, 20 nt, synthetic construct
  source 1..20: mol_type = other RNA
ggagaaccctttttagactg

SEQ ID NO: 3262 - RNA, 20 nt, synthetic construct
  source 1..20: mol_type = other RNA
gagaaccctttttagactgg

SEQ ID NO: 3263 - RNA, 20 nt, synthetic construct
  source 1..20: mol_type = other RNA
agaaccctttttagactgga

SEQ ID NO: 3264 - RNA, 20 nt, synthetic construct
  source 1..20: mol_type = other RNA
gaaccctttttagactggat

SEQ ID NO: 3265 - RNA, 20 nt, synthetic construct
  source 1..20: mol_type = other RNA
aaccctttttagactggatt

SEQ ID NO: 3266 - RNA, 20 nt, synthetic construct
  source 1..20: mol_type = other RNA
accctttttagactggattt

SEQ ID NO: 3267 - RNA, 20 nt, synthetic construct
  source 1..20: mol_type = other RNA
ccctttttagactggatttt

SEQ ID NO: 3268 - RNA, 20 nt, synthetic construct
  source 1..20: mol_type = other RNA
ctttttagactggattttca

SEQ ID NO: 3269 - RNA, 20 nt, synthetic construct
  source 1..20: mol_type = other RNA
tttttagactggattttcag

SEQ ID NO: 3270 - RNA, 20 nt, synthetic construct
  source 1..20: mol_type = other RNA
tttagactggattttcagat

SEQ ID NO: 3271 - RNA, 20 nt, synthetic construct
  source 1..20: mol_type = other RNA
ttagactggattttcagatt

SEQ ID NO: 3272 - RNA, 20 nt, synthetic construct
  source 1..20: mol_type = other RNA
tagactggattttcagattt

SEQ ID NO: 3273 - RNA, 20 nt, synthetic construct
  source 1..20: mol_type = other RNA
agactggattttcagatttt

SEQ ID NO: 3274 - RNA, 20 nt, synthetic construct
  source 1..20: mol_type = other RNA
actggattttcagattttga

SEQ ID NO: 3275 - RNA, 20 nt, synthetic construct
  source 1..20: mol_type = other RNA
ctggattttcagattttgat

SEQ ID NO: 3276 - RNA, 20 nt, synthetic construct
  source 1..20: mol_type = other RNA
ttttcagattttgatattga

SEQ ID NO: 3277 - RNA, 20 nt, synthetic construct
  source 1..20: mol_type = other RNA
tttcagattttgatattgag

SEQ ID NO: 3278 - RNA, 20 nt, synthetic construct
  source 1..20: mol_type = other RNA
tcagattttgatattgagct

SEQ ID NO: 3279 - RNA, 20 nt, synthetic construct
  source 1..20: mol_type = other RNA
agattttgatattgagcttc

SEQ ID NO: 3280 - RNA, 20 nt, synthetic construct
  source 1..20: mol_type = other RNA
gattttgatattgagcttct

SEQ ID NO: 3281 - RNA, 20 nt, synthetic construct
  source 1..20: mol_type = other RNA
ttttgatattgagcttctct

SEQ ID NO: 3282 - RNA, 20 nt, synthetic construct
  source 1..20: mol_type = other RNA
tttgatattgagcttctctc

SEQ ID NO: 3283 - RNA, 20 nt, synthetic construct
  source 1..20: mol_type = other RNA
ttgatattgagcttctctct

SEQ ID NO: 3284 - RNA, 20 nt, synthetic construct
  source 1..20: mol_type = other RNA
tgatattgagcttctctctc

SEQ ID NO: 3285 - RNA, 20 nt, synthetic construct
  source 1..20: mol_type = other RNA
gatattgagcttctctctct

SEQ ID NO: 3286 - RNA, 20 nt, synthetic construct
  source 1..20: mol_type = other RNA
ttgagcttctctctctgggg

SEQ ID NO: 3287 - RNA, 20 nt, synthetic construct
  source 1..20: mol_type = other RNA
tgagcttctctctctggggg

SEQ ID NO: 3288 - RNA, 20 nt, synthetic construct
  source 1..20: mol_type = other RNA
gagcttctctctctggggga

SEQ ID NO: 3289 - RNA, 20 nt, synthetic construct
  source 1..20: mol_type = other RNA
agcttctctctctgggggat

SEQ ID NO: 3290 - RNA, 20 nt, synthetic construct
  source 1..20: mol_type = other RNA
cttctctctctgggggatct

SEQ ID NO: 3291 - RNA, 20 nt, synthetic construct
  source 1..20: mol_type = other RNA
ttctctctctgggggatctg

SEQ ID NO: 3292 - RNA, 20 nt, synthetic construct
  source 1..20: mol_type = other RNA
tctctctctgggggatctgg

SEQ ID NO: 3293 - RNA, 20 nt, synthetic construct
  source 1..20: mol_type = other RNA
ctctctctgggggatctggg

SEQ ID NO: 3294 - RNA, 20 nt, synthetic construct
  source 1..20: mol_type = other RNA
ctctctgggggatctggggt

SEQ ID NO: 3295 - RNA, 20 nt, synthetic construct
  source 1..20: mol_type = other RNA
tctctgggggatctggggtc

SEQ ID NO: 3296 - RNA, 20 nt, synthetic construct
  source 1..20: mol_type = other RNA
ctctgggggatctggggtcg

SEQ ID NO: 3297 - RNA, 20 nt, synthetic construct
  source 1..20: mol_type = other RNA
tctgggggatctggggtcgt

SEQ ID NO: 3298 - RNA, 20 nt, synthetic construct
  source 1..20: mol_type = other RNA
tgggggatctggggtcgttt

SEQ ID NO: 3299 - RNA, 20 nt, synthetic construct
  source 1..20: mol_type = other RNA
gggggatctggggtcgtttt

SEQ ID NO: 3300 - RNA, 20 nt, synthetic construct
  source 1..20: mol_type = other RNA
ggggatctggggtcgttttt

SEQ ID NO: 3301 - RNA, 20 nt, synthetic construct
  source 1..20: mol_type = other RNA
gggatctggggtcgtttttt

SEQ ID NO: 3302 - RNA, 20 nt, synthetic construct
  source 1..20: mol_type = other RNA
gatctggggtcgttttttcc

SEQ ID NO: 3303 - RNA, 20 nt, synthetic construct
  source 1..20: mol_type = other RNA
atctggggtcgttttttcct

SEQ ID NO: 3304 - RNA, 20 nt, synthetic construct
  source 1..20: mol_type = other RNA
tctggggtcgttttttcctc

SEQ ID NO: 3305 - RNA, 20 nt, synthetic construct
  source 1..20: mol_type = other RNA
ggggtcgttttttcctcaaa

SEQ ID NO: 3306 - RNA, 20 nt, synthetic construct
  source 1..20: mol_type = other RNA
ggtcgttttttcctcaaatc

SEQ ID NO: 3307 - RNA, 20 nt, synthetic construct
  source 1..20: mol_type = other RNA
gtcgttttttcctcaaatca

SEQ ID NO: 3308 - RNA, 20 nt, synthetic construct
  source 1..20: mol_type = other RNA
tcgttttttcctcaaatcag

SEQ ID NO: 3309 - RNA, 20 nt, synthetic construct
  source 1..20: mol_type = other RNA
cgttttttcctcaaatcagg

SEQ ID NO: 3310 - RNA, 20 nt, synthetic construct
  source 1..20: mol_type = other RNA
tttttcctcaaatcaggagt

SEQ ID NO: 3311 - RNA, 20 nt, synthetic construct
  source 1..20: mol_type = other RNA
tttcctcaaatcaggagtct

SEQ ID NO: 3312 - RNA, 20 nt, synthetic construct
  source 1..20: mol_type = other RNA
tcctcaaatcaggagtctct

SEQ ID NO: 3313 - RNA, 20 nt, synthetic construct
  source 1..20: mol_type = other RNA
cctcaaatcaggagtctctt

SEQ ID NO: 3314 - RNA, 20 nt, synthetic construct
  source 1..20: mol_type = other RNA
tcaaatcaggagtctctttt

SEQ ID NO: 3315 - RNA, 20 nt, synthetic construct
  source 1..20: mol_type = other RNA
caaatcaggagtctcttttc

SEQ ID NO: 3316 - RNA, 20 nt, synthetic construct
  source 1..20: mol_type = other RNA
caggagtctcttttcctcta

SEQ ID NO: 3317 - RNA, 20 nt, synthetic construct
  source 1..20: mol_type = other RNA
gagtctcttttcctctagat

SEQ ID NO: 3318 - RNA, 20 nt, synthetic construct
  source 1..20: mol_type = other RNA
agtctcttttcctctagatt

SEQ ID NO: 3319 - RNA, 20 nt, synthetic construct
  source 1..20: mol_type = other RNA
cttttcctctagattttggc

SEQ ID NO: 3320 - RNA, 20 nt, synthetic construct
  source 1..20: mol_type = other RNA
ttttcctctagattttggcc

SEQ ID NO: 3321 - RNA, 20 nt, synthetic construct
  source 1..20: mol_type = other RNA
ttcctctagattttggccct

SEQ ID NO: 3322 - RNA, 20 nt, synthetic construct
  source 1..20: mol_type = other RNA
tcctctagattttggccctg

SEQ ID NO: 3323 - RNA, 20 nt, synthetic construct
  source 1..20: mol_type = other RNA
cctctagattttggccctgt

SEQ ID NO: 3324 - RNA, 20 nt, synthetic construct
  source 1..20: mol_type = other RNA
ctctagattttggccctgtg

SEQ ID NO: 3325 - RNA, 20 nt, synthetic construct
  source 1..20: mol_type = other RNA
tctagattttggccctgtgt

SEQ ID NO: 3326 - RNA, 20 nt, synthetic construct
  source 1..20: mol_type = other RNA
ctagattttggccctgtgtc

SEQ ID NO: 3327 - RNA, 20 nt, synthetic construct
  source 1..20: mol_type = other RNA
agattttggccctgtgtctc

SEQ ID NO: 3328 - RNA, 20 nt, synthetic construct
  source 1..20: mol_type = other RNA
gattttggccctgtgtctca

SEQ ID NO: 3329 - RNA, 20 nt, synthetic construct
  source 1..20: mol_type = other RNA
attttggccctgtgtctcaa

SEQ ID NO: 3330 - RNA, 20 nt, synthetic construct
  source 1..20: mol_type = other RNA
ttttggccctgtgtctcaaa

SEQ ID NO: 3331 - RNA, 20 nt, synthetic construct
  source 1..20: mol_type = other RNA
tttggccctgtgtctcaaat

SEQ ID NO: 3332 - RNA, 20 nt, synthetic construct
  source 1..20: mol_type = other RNA
ttggccctgtgtctcaaatt

SEQ ID NO: 3333 - RNA, 20 nt, synthetic construct
  source 1..20: mol_type = other RNA
ggccctgtgtctcaaattac

SEQ ID NO: 3334 - RNA, 20 nt, synthetic construct
  source 1..20: mol_type = other RNA
gccctgtgtctcaaattacc

SEQ ID NO: 3335 - RNA, 20 nt, synthetic construct
  source 1..20: mol_type = other RNA
ccctgtgtctcaaattaccc

SEQ ID NO: 3336 - RNA, 20 nt, synthetic construct
  source 1..20: mol_type = other RNA
cctgtgtctcaaattacccc

SEQ ID NO: 3337 - RNA, 20 nt, synthetic construct
  source 1..20: mol_type = other RNA
ctgtgtctcaaattacccca

SEQ ID NO: 3338 - RNA, 20 nt, synthetic construct
  source 1..20: mol_type = other RNA
tgtgtctcaaattaccccac

SEQ ID NO: 3339 - RNA, 20 nt, synthetic construct
  source 1..20: mol_type = other RNA
gtgtctcaaattaccccaca

SEQ ID NO: 3340 - RNA, 20 nt, synthetic construct
  source 1..20: mol_type = other RNA
tgtctcaaattaccccacag

SEQ ID NO: 3341 - RNA, 20 nt, synthetic construct
  source 1..20: mol_type = other RNA
gtctcaaattaccccacagt

SEQ ID NO: 3342 - RNA, 20 nt, synthetic construct
  source 1..20: mol_type = other RNA
tctcaaattaccccacagtg

SEQ ID NO: 3343 - RNA, 20 nt, synthetic construct
  source 1..20: mol_type = other RNA
ctcaaattaccccacagtgg

SEQ ID NO: 3344 - RNA, 20 nt, synthetic construct
  source 1..20: mol_type = other RNA
tcaaattaccccacagtggg

SEQ ID NO: 3345 - RNA, 20 nt, synthetic construct
  source 1..20: mol_type = other RNA
caaattaccccacagtgggg

SEQ ID NO: 3346 - RNA, 20 nt, synthetic construct
  source 1..20: mol_type = other RNA
aaattaccccacagtggggg

SEQ ID NO: 3347 - RNA, 20 nt, synthetic construct
  source 1..20: mol_type = other RNA
aattaccccacagtgggggg

SEQ ID NO: 3348 - RNA, 20 nt, synthetic construct
  source 1..20: mol_type = other RNA
ttaccccacagtggggggtg

SEQ ID NO: 3349 - RNA, 20 nt, synthetic construct
  source 1..20: mol_type = other RNA
taccccacagtggggggtgg

SEQ ID NO: 3350 - RNA, 20 nt, synthetic construct
  source 1..20: mol_type = other RNA
accccacagtggggggtggt

SEQ ID NO: 3351 - RNA, 20 nt, synthetic construct
  source 1..20: mol_type = other RNA
ccccacagtggggggtggtg

SEQ ID NO: 3352 - RNA, 20 nt, synthetic construct
  source 1..20: mol_type = other RNA
cccacagtggggggtggtga

SEQ ID NO: 3353 - RNA, 20 nt, synthetic construct
  source 1..20: mol_type = other RNA
cacagtggggggtggtgaag

SEQ ID NO: 3354 - RNA, 20 nt, synthetic construct
  source 1..20: mol_type = other RNA
acagtggggggtggtgaagt

SEQ ID NO: 3355 - RNA, 20 nt, synthetic construct
  source 1..20: mol_type = other RNA
agtggggggtggtgaagtat

SEQ ID NO: 3356 - RNA, 20 nt, synthetic construct
  source 1..20: mol_type = other RNA
gtggggggtggtgaagtatc

SEQ ID NO: 3357 - RNA, 20 nt, synthetic construct
  source 1..20: mol_type = other RNA
ggggggtggtgaagtatctt

SEQ ID NO: 3358 - RNA, 20 nt, synthetic construct
  source 1..20: mol_type = other RNA
gggggtggtgaagtatcttt

SEQ ID NO: 3359 - RNA, 20 nt, synthetic construct
  source 1..20: mol_type = other RNA
ggggtggtgaagtatctttc

SEQ ID NO: 3360 - RNA, 20 nt, synthetic construct
  source 1..20: mol_type = other RNA
gggtggtgaagtatctttct

SEQ ID NO: 3361 - RNA, 20 nt, synthetic construct
  source 1..20: mol_type = other RNA
ggtggtgaagtatctttctc

SEQ ID NO: 3362 - RNA, 20 nt, synthetic construct
  source 1..20: mol_type = other RNA
gtggtgaagtatctttctct

SEQ ID NO: 3363 - RNA, 20 nt, synthetic construct
  source 1..20: mol_type = other RNA
tggtgaagtatctttctctg

SEQ ID NO: 3364 - RNA, 20 nt, synthetic construct
  source 1..20: mol_type = other RNA
ggtgaagtatctttctctgt

SEQ ID NO: 3365 - RNA, 20 nt, synthetic construct
  source 1..20: mol_type = other RNA
gtgaagtatctttctctgtg

SEQ ID NO: 3366 - RNA, 20 nt, synthetic construct
  source 1..20: mol_type = other RNA
tgaagtatctttctctgtgg

SEQ ID NO: 3367 - RNA, 20 nt, synthetic construct
  source 1..20: mol_type = other RNA
gaagtatctttctctgtggg

SEQ ID NO: 3368 - RNA, 20 nt, synthetic construct
  source 1..20: mol_type = other RNA
aagtatctttctctgtgggt

SEQ ID NO: 3369 - RNA, 20 nt, synthetic construct
  source 1..20: mol_type = other RNA
atctttctctgtgggtctag

SEQ ID NO: 3370 - RNA, 20 nt, synthetic construct
  source 1..20: mol_type = other RNA
tctttctctgtgggtctagg

SEQ ID NO: 3371 - RNA, 20 nt, synthetic construct
  source 1..20: mol_type = other RNA
ctttctctgtgggtctaggg

SEQ ID NO: 3372 - RNA, 20 nt, synthetic construct
  source 1..20: mol_type = other RNA
tttctctgtgggtctagggt

SEQ ID NO: 3373 - RNA, 20 nt, synthetic construct
  source 1..20: mol_type = other RNA
ttctctgtgggtctagggtc

SEQ ID NO: 3374 - RNA, 20 nt, synthetic construct
  source 1..20: mol_type = other RNA
tctctgtgggtctagggtct

SEQ ID NO: 3375 - RNA, 20 nt, synthetic construct
  source 1..20: mol_type = other RNA
ctctgtgggtctagggtctc

SEQ ID NO: 3376 - RNA, 20 nt, synthetic construct
  source 1..20: mol_type = other RNA
tctgtgggtctagggtctct

SEQ ID NO: 3377 - RNA, 20 nt, synthetic construct
  source 1..20: mol_type = other RNA
ctgtgggtctagggtctctc

SEQ ID NO: 3378 - RNA, 20 nt, synthetic construct
  source 1..20: mol_type = other RNA
tgtgggtctagggtctctct

SEQ ID NO: 3379 - RNA, 20 nt, synthetic construct
  source 1..20: mol_type = other RNA
gtgggtctagggtctctctg

SEQ ID NO: 3380 - RNA, 20 nt, synthetic construct
  source 1..20: mol_type = other RNA
tgggtctagggtctctctgt

SEQ ID NO: 3381 - RNA, 20 nt, synthetic construct
  source 1..20: mol_type = other RNA
gggtctagggtctctctgtc

SEQ ID NO: 3382 - RNA, 20 nt, synthetic construct
  source 1..20: mol_type = other RNA
ggtctagggtctctctgtct

SEQ ID NO: 3383 - RNA, 20 nt, synthetic construct
  source 1..20: mol_type = other RNA
gtctagggtctctctgtctc

SEQ ID NO: 3384 - RNA, 20 nt, synthetic construct
  source 1..20: mol_type = other RNA
tctagggtctctctgtctca

SEQ ID NO: 3385 - RNA, 20 nt, synthetic construct
  source 1..20: mol_type = other RNA
ctagggtctctctgtctcag

SEQ ID NO: 3386 - RNA, 20 nt, synthetic construct
  source 1..20: mol_type = other RNA
agggtctctctgtctcaggg

SEQ ID NO: 3387 - RNA, 20 nt, synthetic construct
  source 1..20: mol_type = other RNA
gtctctctgtctcagggtct

SEQ ID NO: 3388 - RNA, 20 nt, synthetic construct
  source 1..20: mol_type = other RNA
tctctgtctcagggtctggg

SEQ ID NO: 3389 - RNA, 20 nt, synthetic construct
  source 1..20: mol_type = other RNA
ctctgtctcagggtctgggg

SEQ ID NO: 3390 - RNA, 20 nt, synthetic construct
  source 1..20: mol_type = other RNA
tctgtctcagggtctggggt

SEQ ID NO: 3391 - RNA, 20 nt, synthetic construct
  source 1..20: mol_type = other RNA
ctgtctcagggtctggggtc

SEQ ID NO: 3392 - RNA, 20 nt, synthetic construct
  source 1..20: mol_type = other RNA
gtctcagggtctggggtctg

SEQ ID NO: 3393 - RNA, 20 nt, synthetic construct
  source 1..20: mol_type = other RNA
ctcagggtctggggtctgca

SEQ ID NO: 3394 - RNA, 20 nt, synthetic construct
  source 1..20: mol_type = other RNA
tcagggtctggggtctgcat

SEQ ID NO: 3395 - RNA, 20 nt, synthetic construct
  source 1..20: mol_type = other RNA
gtctggggtctgcatcttta

SEQ ID NO: 3396 - RNA, 20 nt, synthetic construct
  source 1..20: mol_type = other RNA
tctggggtctgcatctttag

SEQ ID NO: 3397 - RNA, 20 nt, synthetic construct
  source 1..20: mol_type = other RNA
ctggggtctgcatctttagg

SEQ ID NO: 3398 - RNA, 20 nt, synthetic construct
  source 1..20: mol_type = other RNA
tggggtctgcatctttagga

SEQ ID NO: 3399 - RNA, 20 nt, synthetic construct
  source 1..20: mol_type = other RNA
gggtctgcatctttaggacc

SEQ ID NO: 3400 - RNA, 20 nt, synthetic construct
  source 1..20: mol_type = other RNA
ggtctgcatctttaggacct

SEQ ID NO: 3401 - RNA, 20 nt, synthetic construct
  source 1..20: mol_type = other RNA
tgcatctttaggacctctgt

SEQ ID NO: 3402 - RNA, 20 nt, synthetic construct
  source 1..20: mol_type = other RNA
catctttaggacctctgtct

SEQ ID NO: 3403 - RNA, 20 nt, synthetic construct
  source 1..20: mol_type = other RNA
atctttaggacctctgtctc

SEQ ID NO: 3404 - RNA, 20 nt, synthetic construct
  source 1..20: mol_type = other RNA
ctttaggacctctgtctctc

SEQ ID NO: 3405 - RNA, 20 nt, synthetic construct
  source 1..20: mol_type = other RNA
aggacctctgtctctctctg

SEQ ID NO: 3406 - RNA, 20 nt, synthetic construct
  source 1..20: mol_type = other RNA
ggacctctgtctctctctgg

SEQ ID NO: 3407 - RNA, 20 nt, synthetic construct
  source 1..20: mol_type = other RNA
ctgtctctctctggtgtgtt

SEQ ID NO: 3408 - RNA, 21 nt, synthetic construct
  source 1..21: mol_type = other RNA
gggtctggagtctaagatatc

SEQ ID NO: 3409 - RNA, 21 nt, synthetic construct
  source 1..21: mol_type = other RNA
ggtctggagtctaagatatct

SEQ ID NO: 3410 - RNA, 21 nt, synthetic construct
  source 1..21: mol_type = other RNA
gtctggagtctaagatatctg

SEQ ID NO: 3411 - RNA, 21 nt, synthetic construct
  source 1..21: mol_type = other RNA
tctggagtctaagatatctgt

SEQ ID NO: 3412 - RNA, 21 nt, synthetic construct
  source 1..21: mol_type = other RNA
ctggagtctaagatatctgta

SEQ ID NO: 3413 - RNA, 21 nt, synthetic construct
  source 1..21: mol_type = other RNA
tggagtctaagatatctgtag

SEQ ID NO: 3414 - RNA, 21 nt, synthetic construct
  source 1..21: mol_type = other RNA
ggagtctaagatatctgtagg

SEQ ID NO: 3415 - RNA, 21 nt, synthetic construct
  source 1..21: mol_type = other RNA
gagtctaagatatctgtaggt

SEQ ID NO: 3416 - RNA, 21 nt, synthetic construct
  source 1..21: mol_type = other RNA
agtctaagatatctgtaggta

SEQ ID NO: 3417 - RNA, 21 nt, synthetic construct
  source 1..21: mol_type = other RNA
gtctaagatatctgtaggtat

SEQ ID NO: 3418 - RNA, 21 nt, synthetic construct
  source 1..21: mol_type = other RNA
tctaagatatctgtaggtatg

SEQ ID NO: 3419 - RNA, 21 nt, synthetic construct
  source 1..21: mol_type = other RNA
ctaagatatctgtaggtatgg

SEQ ID NO: 3420 - RNA, 21 nt, synthetic construct
  source 1..21: mol_type = other RNA
taagatatctgtaggtatgga

SEQ ID NO: 3421 - RNA, 21 nt, synthetic construct
  source 1..21: mol_type = other RNA
aagatatctgtaggtatggag

SEQ ID NO: 3422 - RNA, 21 nt, synthetic construct
  source 1..21: mol_type = other RNA
agatatctgtaggtatggaga

SEQ ID NO: 3423 - RNA, 21 nt, synthetic construct
  source 1..21: mol_type = other RNA
gatatctgtaggtatggagaa

SEQ ID NO: 3424 - RNA, 21 nt, synthetic construct
  source 1..21: mol_type = other RNA
atatctgtaggtatggagaac

SEQ ID NO: 3425 - RNA, 21 nt, synthetic construct
  source 1..21: mol_type = other RNA
atctgtaggtatggagaaccc

SEQ ID NO: 3426 - RNA, 21 nt, synthetic construct
  source 1..21: mol_type = other RNA
tctgtaggtatggagaaccct

SEQ ID NO: 3427 - RNA, 21 nt, synthetic construct
  source 1..21: mol_type = other RNA
ctgtaggtatggagaaccctt

SEQ ID NO: 3428 - RNA, 21 nt, synthetic construct
  source 1..21: mol_type = other RNA
tgtaggtatggagaacccttt

SEQ ID NO: 3429 - RNA, 21 nt, synthetic construct
  source 1..21: mol_type = other RNA
gtaggtatggagaaccctttt

SEQ ID NO: 3430 - RNA, 21 nt, synthetic construct
  source 1..21: mol_type = other RNA
taggtatggagaacccttttt

SEQ ID NO: 3431 - RNA, 21 nt, synthetic construct
  source 1..21: mol_type = other RNA
aggtatggagaacccttttta

SEQ ID NO: 3432 - RNA, 21 nt, synthetic construct
  source 1..21: mol_type = other RNA
ggtatggagaaccctttttag

SEQ ID NO: 3433 - RNA, 21 nt, synthetic construct
  source 1..21: mol_type = other RNA
gtatggagaaccctttttaga

SEQ ID NO: 3434 - RNA, 21 nt, synthetic construct
  source 1..21: mol_type = other RNA
tatggagaaccctttttagac

SEQ ID NO: 3435 - RNA, 21 nt, synthetic construct
  source 1..21: mol_type = other RNA
atggagaaccctttttagact

SEQ ID NO: 3436 - RNA, 21 nt, synthetic construct
  source 1..21: mol_type = other RNA
tggagaaccctttttagactg

SEQ ID NO: 3437 - RNA, 21 nt, synthetic construct
  source 1..21: mol_type = other RNA
ggagaaccctttttagactgg

SEQ ID NO: 3438 - RNA, 21 nt, synthetic construct
  source 1..21: mol_type = other RNA
gagaaccctttttagactgga

SEQ ID NO: 3439 - RNA, 21 nt, synthetic construct
  source 1..21: mol_type = other RNA
agaaccctttttagactggat

SEQ ID NO: 3440 - RNA, 21 nt, synthetic construct
  source 1..21: mol_type = other RNA
gaaccctttttagactggatt

SEQ ID NO: 3441 - RNA, 21 nt, synthetic construct
  source 1..21: mol_type = other RNA
aaccctttttagactggattt

SEQ ID NO: 3442 - RNA, 21 nt, synthetic construct
  source 1..21: mol_type = other RNA
accctttttagactggatttt

SEQ ID NO: 3443 - RNA, 21 nt, synthetic construct
  source 1..21: mol_type = other RNA
ccctttttagactggattttc

SEQ ID NO: 3444 - RNA, 21 nt, synthetic construct
  source 1..21: mol_type = other RNA
cctttttagactggattttca

SEQ ID NO: 3445 - RNA, 21 nt, synthetic construct
  source 1..21: mol_type = other RNA
ctttttagactggattttcag

SEQ ID NO: 3446 - RNA, 21 nt, synthetic construct
  source 1..21: mol_type = other RNA
tttttagactggattttcaga

SEQ ID NO: 3447 - RNA, 21 nt, synthetic construct
  source 1..21: mol_type = other RNA
ttttagactggattttcagat

SEQ ID NO: 3448 - RNA, 21 nt, synthetic construct
  source 1..21: mol_type = other RNA
tttagactggattttcagatt

SEQ ID NO: 3449 - RNA, 21 nt, synthetic construct
  source 1..21: mol_type = other RNA
ttagactggattttcagattt

SEQ ID NO: 3450 - RNA, 21 nt, synthetic construct
  source 1..21: mol_type = other RNA
tagactggattttcagatttt

SEQ ID NO: 3451 - RNA, 21 nt, synthetic construct
  source 1..21: mol_type = other RNA
agactggattttcagattttg

SEQ ID NO: 3452 - RNA, 21 nt, synthetic construct
  source 1..21: mol_type = other RNA
gactggattttcagattttga

SEQ ID NO: 3453 - RNA, 21 nt, synthetic construct
  source 1..21: mol_type = other RNA
actggattttcagattttgat

SEQ ID NO: 3454 - RNA, 21 nt, synthetic construct
  source 1..21: mol_type = other RNA
ctggattttcagattttgata

SEQ ID NO: 3455 - RNA, 21 nt, synthetic construct
  source 1..21: mol_type = other RNA
ggattttcagattttgatatt

SEQ ID NO: 3456 - RNA, 21 nt, synthetic construct
  source 1..21: mol_type = other RNA
gattttcagattttgatattg

SEQ ID NO: 3457 - RNA, 21 nt, synthetic construct
  source 1..21: mol_type = other RNA
attttcagattttgatattga

SEQ ID NO: 3458 - RNA, 21 nt, synthetic construct
  source 1..21: mol_type = other RNA
ttttcagattttgatattgag

SEQ ID NO: 3459 - RNA, 21 nt, synthetic construct
  source 1..21: mol_type = other RNA
tttcagattttgatattgagc

SEQ ID NO: 3460 - RNA, 21 nt, synthetic construct
  source 1..21: mol_type = other RNA
ttcagattttgatattgagct

SEQ ID NO: 3461 - RNA, 21 nt, synthetic construct
  source 1..21: mol_type = other RNA
tcagattttgatattgagctt

SEQ ID NO: 3462 - RNA, 21 nt, synthetic construct
  source 1..21: mol_type = other RNA
cagattttgatattgagcttc

SEQ ID NO: 3463 - RNA, 21 nt, synthetic construct
  source 1..21: mol_type = other RNA
agattttgatattgagcttct

SEQ ID NO: 3464 - RNA, 21 nt, synthetic construct
  source 1..21: mol_type = other RNA
gattttgatattgagcttctc

SEQ ID NO: 3465 - RNA, 21 nt, synthetic construct
  source 1..21: mol_type = other RNA
attttgatattgagcttctct

SEQ ID NO: 3466 - RNA, 21 nt, synthetic construct
  source 1..21: mol_type = other RNA
ttttgatattgagcttctctc

SEQ ID NO: 3467 - RNA, 21 nt, synthetic construct
  source 1..21: mol_type = other RNA
tttgatattgagcttctctct

SEQ ID NO: 3468 - RNA, 21 nt, synthetic construct
  source 1..21: mol_type = other RNA
ttgatattgagcttctctctc

SEQ ID NO: 3469 - RNA, 21 nt, synthetic construct
  source 1..21: mol_type = other RNA
tgatattgagcttctctctct

SEQ ID NO: 3470 - RNA, 21 nt, synthetic construct
  source 1..21: mol_type = other RNA
gatattgagcttctctctctg

SEQ ID NO: 3471 - RNA, 21 nt, synthetic construct
  source 1..21: mol_type = other RNA
atattgagcttctctctctgg

SEQ ID NO: 3472 - RNA, 21 nt, synthetic construct
  source 1..21: mol_type = other RNA
tattgagcttctctctctggg

SEQ ID NO: 3473 - RNA, 21 nt, synthetic construct
  source 1..21: mol_type = other RNA
attgagcttctctctctgggg

SEQ ID NO: 3474 - RNA, 21 nt, synthetic construct
  source 1..21: mol_type = other RNA
ttgagcttctctctctggggg

SEQ ID NO: 3475 - RNA, 21 nt, synthetic construct
  source 1..21: mol_type = other RNA
tgagcttctctctctggggga

SEQ ID NO: 3476 - RNA, 21 nt, synthetic construct
  source 1..21: mol_type = other RNA
gagcttctctctctgggggat

SEQ ID NO: 3477 - RNA, 21 nt, synthetic construct
  source 1..21: mol_type = other RNA
agcttctctctctgggggatc

SEQ ID NO: 3478 - RNA, 21 nt, synthetic construct
  source 1..21: mol_type = other RNA
gcttctctctctgggggatct

SEQ ID NO: 3479 - RNA, 21 nt, synthetic construct
  source 1..21: mol_type = other RNA
cttctctctctgggggatctg

SEQ ID NO: 3480 - RNA, 21 nt, synthetic construct
  source 1..21: mol_type = other RNA
ttctctctctgggggatctgg

SEQ ID NO: 3481 - RNA, 21 nt, synthetic construct
  source 1..21: mol_type = other RNA
tctctctctgggggatctggg

SEQ ID NO: 3482 - RNA, 21 nt, synthetic construct
  source 1..21: mol_type = other RNA
ctctctctgggggatctgggg

SEQ ID NO: 3483 - RNA, 21 nt, synthetic construct
  source 1..21: mol_type = other RNA
tctctctgggggatctggggt

SEQ ID NO: 3484 - RNA, 21 nt, synthetic construct
  source 1..21: mol_type = other RNA
ctctctgggggatctggggtc

SEQ ID NO: 3485 - RNA, 21 nt, synthetic construct
  source 1..21: mol_type = other RNA
tctctgggggatctggggtcg

SEQ ID NO: 3486 - RNA, 21 nt, synthetic construct
  source 1..21: mol_type = other RNA
ctctgggggatctggggtcgt

SEQ ID NO: 3487 - RNA, 21 nt, synthetic construct
  source 1..21: mol_type = other RNA
tctgggggatctggggtcgtt

SEQ ID NO: 3488 - RNA, 21 nt, synthetic construct
  source 1..21: mol_type = other RNA
ctgggggatctggggtcgttt

SEQ ID NO: 3489 - RNA, 21 nt, synthetic construct
  source 1..21: mol_type = other RNA
tgggggatctggggtcgtttt

SEQ ID NO: 3490 - RNA, 21 nt, synthetic construct
  source 1..21: mol_type = other RNA
gggggatctggggtcgttttt

SEQ ID NO: 3491 - RNA, 21 nt, synthetic construct
  source 1..21: mol_type = other RNA
ggggatctggggtcgtttttt

SEQ ID NO: 3492 - RNA, 21 nt, synthetic construct
  source 1..21: mol_type = other RNA
gggatctggggtcgttttttc

SEQ ID NO: 3493 - RNA, 21 nt, synthetic construct
  source 1..21: mol_type = other RNA
ggatctggggtcgttttttcc

SEQ ID NO: 3494 - RNA, 21 nt, synthetic construct
  source 1..21: mol_type = other RNA
gatctggggtcgttttttcct

SEQ ID NO: 3495 - RNA, 21 nt, synthetic construct
  source 1..21: mol_type = other RNA
atctggggtcgttttttcctc

SEQ ID NO: 3496 - RNA, 21 nt, synthetic construct
  source 1..21: mol_type = other RNA
tctggggtcgttttttcctca

SEQ ID NO: 3497 - RNA, 21 nt, synthetic construct
  source 1..21: mol_type = other RNA
tggggtcgttttttcctcaaa

SEQ ID NO: 3498 - RNA, 21 nt, synthetic construct
  source 1..21: mol_type = other RNA
ggggtcgttttttcctcaaat

SEQ ID NO: 3499 - RNA, 21 nt, synthetic construct
  source 1..21: mol_type = other RNA
gggtcgttttttcctcaaatc

SEQ ID NO: 3500 - RNA, 21 nt, synthetic construct
  source 1..21: mol_type = other RNA
ggtcgttttttcctcaaatca

SEQ ID NO: 3501 - RNA, 21 nt, synthetic construct
  source 1..21: mol_type = other RNA
gtcgttttttcctcaaatcag

SEQ ID NO: 3502 - RNA, 21 nt, synthetic construct
  source 1..21: mol_type = other RNA
tcgttttttcctcaaatcagg

SEQ ID NO: 3503 - RNA, 21 nt, synthetic construct
  source 1..21: mol_type = other RNA
cgttttttcctcaaatcagga

SEQ ID NO: 3504 - RNA, 21 nt, synthetic construct
  source 1..21: mol_type = other RNA
gttttttcctcaaatcaggag

SEQ ID NO: 3505 - RNA, 21 nt, synthetic construct
  source 1..21: mol_type = other RNA
ttttttcctcaaatcaggagt

SEQ ID NO: 3506 - RNA, 21 nt, synthetic construct
  source 1..21: mol_type = other RNA
tttttcctcaaatcaggagtc

SEQ ID NO: 3507 - RNA, 21 nt, synthetic construct
  source 1..21: mol_type = other RNA
ttttcctcaaatcaggagtct

SEQ ID NO: 3508 - RNA, 21 nt, synthetic construct
  source 1..21: mol_type = other RNA
tttcctcaaatcaggagtctc

SEQ ID NO: 3509 - RNA, 21 nt, synthetic construct
  source 1..21: mol_type = other RNA
ttcctcaaatcaggagtctct

SEQ ID NO: 3510 - RNA, 21 nt, synthetic construct
  source 1..21: mol_type = other RNA
tcctcaaatcaggagtctctt

SEQ ID NO: 3511 - RNA, 21 nt, synthetic construct
  source 1..21: mol_type = other RNA
cctcaaatcaggagtctcttt

SEQ ID NO: 3512 - RNA, 21 nt, synthetic construct
  source 1..21: mol_type = other RNA
ctcaaatcaggagtctctttt

SEQ ID NO: 3513 - RNA, 21 nt, synthetic construct
  source 1..21: mol_type = other RNA
tcaaatcaggagtctcttttc

SEQ ID NO: 3514 - RNA, 21 nt, synthetic construct
  source 1..21: mol_type = other RNA
caaatcaggagtctcttttcc

SEQ ID NO: 3515 - RNA, 21 nt, synthetic construct
  source 1..21: mol_type = other RNA
tcaggagtctcttttcctcta

SEQ ID NO: 3516 - RNA, 21 nt, synthetic construct
  source 1..21: mol_type = other RNA
caggagtctcttttcctctag

SEQ ID NO: 3517 - RNA, 21 nt, synthetic construct
  source 1..21: mol_type = other RNA
aggagtctcttttcctctaga

SEQ ID NO: 3518 - RNA, 21 nt, synthetic construct
  source 1..21: mol_type = other RNA
ggagtctcttttcctctagat

SEQ ID NO: 3519 - RNA, 21 nt, synthetic construct
  source 1..21: mol_type = other RNA
gagtctcttttcctctagatt

SEQ ID NO: 3520 - RNA, 21 nt, synthetic construct
  source 1..21: mol_type = other RNA
agtctcttttcctctagattt

SEQ ID NO: 3521 - RNA, 21 nt, synthetic construct
  source 1..21: mol_type = other RNA
ctcttttcctctagattttgg

SEQ ID NO: 3522 - RNA, 21 nt, synthetic construct
  source 1..21: mol_type = other RNA
tcttttcctctagattttggc

SEQ ID NO: 3523 - RNA, 21 nt, synthetic construct
  source 1..21: mol_type = other RNA
cttttcctctagattttggcc

SEQ ID NO: 3524 - RNA, 21 nt, synthetic construct
  source 1..21: mol_type = other RNA
ttttcctctagattttggccc

SEQ ID NO: 3525 - RNA, 21 nt, synthetic construct
  source 1..21: mol_type = other RNA
tttcctctagattttggccct

SEQ ID NO: 3526 - RNA, 21 nt, synthetic construct
  source 1..21: mol_type = other RNA
ttcctctagattttggccctg

SEQ ID NO: 3527 - RNA, 21 nt, synthetic construct
  source 1..21: mol_type = other RNA
tcctctagattttggccctgt

SEQ ID NO: 3528 - RNA, 21 nt, synthetic construct
  source 1..21: mol_type = other RNA
cctctagattttggccctgtg

SEQ ID NO: 3529 - RNA, 21 nt, synthetic construct
  source 1..21: mol_type = other RNA
ctctagattttggccctgtgt

SEQ ID NO: 3530 - RNA, 21 nt, synthetic construct
  source 1..21: mol_type = other RNA
tctagattttggccctgtgtc

SEQ ID NO: 3531 - RNA, 21 nt, synthetic construct
  source 1..21: mol_type = other RNA
ctagattttggccctgtgtct

SEQ ID NO: 3532 - RNA, 21 nt, synthetic construct
  source 1..21: mol_type = other RNA
tagattttggccctgtgtctc

SEQ ID NO: 3533 - RNA, 21 nt, synthetic construct
  source 1..21: mol_type = other RNA
agattttggccctgtgtctca

SEQ ID NO: 3534 - RNA, 21 nt, synthetic construct
  source 1..21: mol_type = other RNA
gattttggccctgtgtctcaa

SEQ ID NO: 3535 - RNA, 21 nt, synthetic construct
  source 1..21: mol_type = other RNA
attttggccctgtgtctcaaa

SEQ ID NO: 3536 - RNA, 21 nt, synthetic construct
  source 1..21: mol_type = other RNA
ttttggccctgtgtctcaaat

SEQ ID NO: 3537 - RNA, 21 nt, synthetic construct
  source 1..21: mol_type = other RNA
tttggccctgtgtctcaaatt

SEQ ID NO: 3538 - RNA, 21 nt, synthetic construct
  source 1..21: mol_type = other RNA
ttggccctgtgtctcaaatta

SEQ ID NO: 3539 - RNA, 21 nt, synthetic construct
  source 1..21: mol_type = other RNA
tggccctgtgtctcaaattac

SEQ ID NO: 3540 - RNA, 21 nt, synthetic construct
  source 1..21: mol_type = other RNA
ggccctgtgtctcaaattacc

SEQ ID NO: 3541 - RNA, 21 nt, synthetic construct
  source 1..21: mol_type = other RNA
gccctgtgtctcaaattaccc

SEQ ID NO: 3542 - RNA, 21 nt, synthetic construct
  source 1..21: mol_type = other RNA
ccctgtgtctcaaattacccc

SEQ ID NO: 3543 - RNA, 21 nt, synthetic construct
  source 1..21: mol_type = other RNA
cctgtgtctcaaattacccca

SEQ ID NO: 3544 - RNA, 21 nt, synthetic construct
  source 1..21: mol_type = other RNA
ctgtgtctcaaattaccccac

SEQ ID NO: 3545 - RNA, 21 nt, synthetic construct
  source 1..21: mol_type = other RNA
tgtgtctcaaattaccccaca

SEQ ID NO: 3546 - RNA, 21 nt, synthetic construct
  source 1..21: mol_type = other RNA
gtgtctcaaattaccccacag

SEQ ID NO: 3547 - RNA, 21 nt, synthetic construct
  source 1..21: mol_type = other RNA
tgtctcaaattaccccacagt

SEQ ID NO: 3548 - RNA, 21 nt, synthetic construct
  source 1..21: mol_type = other RNA
gtctcaaattaccccacagtg

SEQ ID NO: 3549 - RNA, 21 nt, synthetic construct
  source 1..21: mol_type = other RNA
tctcaaattaccccacagtgg

SEQ ID NO: 3550 - RNA, 21 nt, synthetic construct
  source 1..21: mol_type = other RNA
ctcaaattaccccacagtggg

SEQ ID NO: 3551 - RNA, 21 nt, synthetic construct
  source 1..21: mol_type = other RNA
tcaaattaccccacagtgggg

SEQ ID NO: 3552 - RNA, 21 nt, synthetic construct
  source 1..21: mol_type = other RNA
caaattaccccacagtggggg

SEQ ID NO: 3553 - RNA, 21 nt, synthetic construct
  source 1..21: mol_type = other RNA
aaattaccccacagtgggggg

SEQ ID NO: 3554 - RNA, 21 nt, synthetic construct
  source 1..21: mol_type = other RNA
aattaccccacagtggggggt

SEQ ID NO: 3555 - RNA, 21 nt, synthetic construct
  source 1..21: mol_type = other RNA
attaccccacagtggggggtg

SEQ ID NO: 3556 - RNA, 21 nt, synthetic construct
  source 1..21: mol_type = other RNA
ttaccccacagtggggggtgg

SEQ ID NO: 3557 - RNA, 21 nt, synthetic construct
  source 1..21: mol_type = other RNA
taccccacagtggggggtggt

SEQ ID NO: 3558 - RNA, 21 nt, synthetic construct
  source 1..21: mol_type = other RNA
accccacagtggggggtggtg

SEQ ID NO: 3559 - RNA, 21 nt, synthetic construct
  source 1..21: mol_type = other RNA
ccccacagtggggggtggtga

SEQ ID NO: 3560 - RNA, 21 nt, synthetic construct
  source 1..21: mol_type = other RNA
cccacagtggggggtggtgaa

SEQ ID NO: 3561 - RNA, 21 nt, synthetic construct
  source 1..21: mol_type = other RNA
ccacagtggggggtggtgaag

SEQ ID NO: 3562 - RNA, 21 nt, synthetic construct
  source 1..21: mol_type = other RNA
cacagtggggggtggtgaagt

SEQ ID NO: 3563 - RNA, 21 nt, synthetic construct
  source 1..21: mol_type = other RNA
acagtggggggtggtgaagta

SEQ ID NO: 3564 - RNA, 21 nt, synthetic construct
  source 1..21: mol_type = other RNA
cagtggggggtggtgaagtat

SEQ ID NO: 3565 - RNA, 21 nt, synthetic construct
  source 1..21: mol_type = other RNA
agtggggggtggtgaagtatc

SEQ ID NO: 3566 - RNA, 21 nt, synthetic construct
  source 1..21: mol_type = other RNA
gtggggggtggtgaagtatct

SEQ ID NO: 3567 - RNA, 21 nt, synthetic construct
  source 1..21: mol_type = other RNA
tggggggtggtgaagtatctt

SEQ ID NO: 3568 - RNA, 21 nt, synthetic construct
  source 1..21: mol_type = other RNA
ggggggtggtgaagtatcttt

SEQ ID NO: 3569 - RNA, 21 nt, synthetic construct
  source 1..21: mol_type = other RNA
gggggtggtgaagtatctttc

SEQ ID NO: 3570 - RNA, 21 nt, synthetic construct
  source 1..21: mol_type = other RNA
ggggtggtgaagtatctttct

SEQ ID NO: 3571 - RNA, 21 nt, synthetic construct
  source 1..21: mol_type = other RNA
gggtggtgaagtatctttctc

SEQ ID NO: 3572 - RNA, 21 nt, synthetic construct
  source 1..21: mol_type = other RNA
ggtggtgaagtatctttctct

SEQ ID NO: 3573 - RNA, 21 nt, synthetic construct
  source 1..21: mol_type = other RNA
gtggtgaagtatctttctctg

SEQ ID NO: 3574 - RNA, 21 nt, synthetic construct
  source 1..21: mol_type = other RNA
tggtgaagtatctttctctgt

SEQ ID NO: 3575 - RNA, 21 nt, synthetic construct
  source 1..21: mol_type = other RNA
ggtgaagtatctttctctgtg

SEQ ID NO: 3576 - RNA, 21 nt, synthetic construct
  source 1..21: mol_type = other RNA
gtgaagtatctttctctgtgg

SEQ ID NO: 3577 - RNA, 21 nt, synthetic construct
  source 1..21: mol_type = other RNA
tgaagtatctttctctgtggg

SEQ ID NO: 3578 - RNA, 21 nt, synthetic construct
  source 1..21: mol_type = other RNA
gaagtatctttctctgtgggt

SEQ ID NO: 3579 - RNA, 21 nt, synthetic construct
  source 1..21: mol_type = other RNA
aagtatctttctctgtgggtc

SEQ ID NO: 3580 - RNA, 21 nt, synthetic construct
  source 1..21: mol_type = other RNA
gtatctttctctgtgggtcta

SEQ ID NO: 3581 - RNA, 21 nt, synthetic construct
  source 1..21: mol_type = other RNA
tatctttctctgtgggtctag

SEQ ID NO: 3582 - RNA, 21 nt, synthetic construct
  source 1..21: mol_type = other RNA
atctttctctgtgggtctagg

SEQ ID NO: 3583 - RNA, 21 nt, synthetic construct
  source 1..21: mol_type = other RNA
tctttctctgtgggtctaggg

SEQ ID NO: 3584 - RNA, 21 nt, synthetic construct
  source 1..21: mol_type = other RNA
ctttctctgtgggtctagggt

SEQ ID NO: 3585 - RNA, 21 nt, synthetic construct
  source 1..21: mol_type = other RNA
tttctctgtgggtctagggtc

SEQ ID NO: 3586 - RNA, 21 nt, synthetic construct
  source 1..21: mol_type = other RNA
ttctctgtgggtctagggtct

SEQ ID NO: 3587 - RNA, 21 nt, synthetic construct
  source 1..21: mol_type = other RNA
tctctgtgggtctagggtctc

SEQ ID NO: 3588 - RNA, 21 nt, synthetic construct
  source 1..21: mol_type = other RNA
ctctgtgggtctagggtctct

SEQ ID NO: 3589 - RNA, 21 nt, synthetic construct
  source 1..21: mol_type = other RNA
tctgtgggtctagggtctctc

SEQ ID NO: 3590 - RNA, 21 nt, synthetic construct
  source 1..21: mol_type = other RNA
ctgtgggtctagggtctctct

SEQ ID NO: 3591 - RNA, 21 nt, synthetic construct
  source 1..21: mol_type = other RNA
tgtgggtctagggtctctctg

SEQ ID NO: 3592 - RNA, 21 nt, synthetic construct
  source 1..21: mol_type = other RNA
gtgggtctagggtctctctgt

SEQ ID NO: 3593 - RNA, 21 nt, synthetic construct
  source 1..21: mol_type = other RNA
tgggtctagggtctctctgtc

SEQ ID NO: 3594 - RNA, 21 nt, synthetic construct
  source 1..21: mol_type = other RNA
gggtctagggtctctctgtct

SEQ ID NO: 3595 - RNA, 21 nt, synthetic construct
  source 1..21: mol_type = other RNA
ggtctagggtctctctgtctc

SEQ ID NO: 3596 - RNA, 21 nt, synthetic construct
  source 1..21: mol_type = other RNA
gtctagggtctctctgtctca

SEQ ID NO: 3597 - RNA, 21 nt, synthetic construct
  source 1..21: mol_type = other RNA
tctagggtctctctgtctcag

SEQ ID NO: 3598 - RNA, 21 nt, synthetic construct
  source 1..21: mol_type = other RNA
ctagggtctctctgtctcagg

SEQ ID NO: 3599 - RNA, 21 nt, synthetic construct
  source 1..21: mol_type = other RNA
tagggtctctctgtctcaggg

SEQ ID NO: 3600 - RNA, 21 nt, synthetic construct
  source 1..21: mol_type = other RNA
agggtctctctgtctcagggt

SEQ ID NO: 3601 - RNA, 21 nt, synthetic construct
  source 1..21: mol_type = other RNA
gggtctctctgtctcagggtc

SEQ ID NO: 3602 - RNA, 21 nt, synthetic construct
  source 1..21: mol_type = other RNA
ggtctctctgtctcagggtct

SEQ ID NO: 3603 - RNA, 21 nt, synthetic construct
  source 1..21: mol_type = other RNA
gtctctctgtctcagggtctg

SEQ ID NO: 3604 - RNA, 21 nt, synthetic construct
  source 1..21: mol_type = other RNA
tctctctgtctcagggtctgg

SEQ ID NO: 3605 - RNA, 21 nt, synthetic construct
  source 1..21: mol_type = other RNA
ctctctgtctcagggtctggg

SEQ ID NO: 3606 - RNA, 21 nt, synthetic construct
  source 1..21: mol_type = other RNA
tctctgtctcagggtctgggg

SEQ ID NO: 3607 - RNA, 21 nt, synthetic construct
  source 1..21: mol_type = other RNA
ctctgtctcagggtctggggt

SEQ ID NO: 3608 - RNA, 21 nt, synthetic construct
  source 1..21: mol_type = other RNA
tctgtctcagggtctggggtc

SEQ ID NO: 3609 - RNA, 21 nt, synthetic construct
  source 1..21: mol_type = other RNA
ctgtctcagggtctggggtct

SEQ ID NO: 3610 - RNA, 21 nt, synthetic construct
  source 1..21: mol_type = other RNA
tgtctcagggtctggggtctg

SEQ ID NO: 3611 - RNA, 21 nt, synthetic construct
  source 1..21: mol_type = other RNA
gtctcagggtctggggtctgc

SEQ ID NO: 3612 - RNA, 21 nt, synthetic construct
  source 1..21: mol_type = other RNA
tctcagggtctggggtctgca

SEQ ID NO: 3613 - RNA, 21 nt, synthetic construct
  source 1..21: mol_type = other RNA
ctcagggtctggggtctgcat

SEQ ID NO: 3614 - RNA, 21 nt, synthetic construct
  source 1..21: mol_type = other RNA
tcagggtctggggtctgcatc

SEQ ID NO: 3615 - RNA, 21 nt, synthetic construct
  source 1..21: mol_type = other RNA
cagggtctggggtctgcatct

SEQ ID NO: 3616 - RNA, 21 nt, synthetic construct
  source 1..21: mol_type = other RNA
agggtctggggtctgcatctt

SEQ ID NO: 3617 - RNA, 21 nt, synthetic construct
  source 1..21: mol_type = other RNA
ggtctggggtctgcatcttta

SEQ ID NO: 3618 - RNA, 21 nt, synthetic construct
  source 1..21: mol_type = other RNA
gtctggggtctgcatctttag

SEQ ID NO: 3619 - RNA, 21 nt, synthetic construct
  source 1..21: mol_type = other RNA
tctggggtctgcatctttagg

SEQ ID NO: 3620 - RNA, 21 nt, synthetic construct
  source 1..21: mol_type = other RNA
ctggggtctgcatctttagga

SEQ ID NO: 3621 - RNA, 21 nt, synthetic construct
  source 1..21: mol_type = other RNA
tggggtctgcatctttaggac

SEQ ID NO: 3622 - RNA, 21 nt, synthetic construct
  source 1..21: mol_type = other RNA
ggggtctgcatctttaggacc

SEQ ID NO: 3623 - RNA, 21 nt, synthetic construct
  source 1..21: mol_type = other RNA
gggtctgcatctttaggacct

SEQ ID NO: 3624 - RNA, 21 nt, synthetic construct
  source 1..21: mol_type = other RNA
ggtctgcatctttaggacctc

SEQ ID NO: 3625 - RNA, 21 nt, synthetic construct
  source 1..21: mol_type = other RNA
ctgcatctttaggacctctgt

SEQ ID NO: 3626 - RNA, 21 nt, synthetic construct
  source 1..21: mol_type = other RNA
tgcatctttaggacctctgtc

SEQ ID NO: 3627 - RNA, 21 nt, synthetic construct
  source 1..21: mol_type = other RNA
gcatctttaggacctctgtct

SEQ ID NO: 3628 - RNA, 21 nt, synthetic construct
  source 1..21: mol_type = other RNA
catctttaggacctctgtctc

SEQ ID NO: 3629 - RNA, 21 nt, synthetic construct
  source 1..21: mol_type = other RNA
atctttaggacctctgtctct

SEQ ID NO: 3630 - RNA, 21 nt, synthetic construct
  source 1..21: mol_type = other RNA
tctttaggacctctgtctctc

SEQ ID NO: 3631 - RNA, 21 nt, synthetic construct
  source 1..21: mol_type = other RNA
ctttaggacctctgtctctct

SEQ ID NO: 3632 - RNA, 21 nt, synthetic construct
  source 1..21: mol_type = other RNA
ttaggacctctgtctctctct

SEQ ID NO: 3633 - RNA, 21 nt, synthetic construct
  source 1..21: mol_type = other RNA
taggacctctgtctctctctg

SEQ ID NO: 3634 - RNA, 21 nt, synthetic construct
  source 1..21: mol_type = other RNA
aggacctctgtctctctctgg

SEQ ID NO: 3635 - RNA, 21 nt, synthetic construct
  source 1..21: mol_type = other RNA
ggacctctgtctctctctggt

SEQ ID NO: 3636 - RNA, 21 nt, synthetic construct
  source 1..21: mol_type = other RNA
cctctgtctctctctggtgtg

SEQ ID NO: 3637 - RNA, 21 nt, synthetic construct
  source 1..21: mol_type = other RNA
tctgtctctctctggtgtgtt

SEQ ID NO: 3638 - RNA, 21 nt, synthetic construct
  source 1..21: mol_type = other RNA
ctgtctctctctggtgtgttt

SEQ ID NO: 3639 - RNA, 22 nt, synthetic construct
  source 1..22: mol_type = other RNA
gggtctggagtctaagatatct

SEQ ID NO: 3640 - RNA, 22 nt, synthetic construct
  source 1..22: mol_type = other RNA
ggtctggagtctaagatatctg

SEQ ID NO: 3641 - RNA, 22 nt, synthetic construct
  source 1..22: mol_type = other RNA
gtctggagtctaagatatctgt

SEQ ID NO: 3642 - RNA, 22 nt, synthetic construct
  source 1..22: mol_type = other RNA
tctggagtctaagatatctgta

SEQ ID NO: 3643 - RNA, 22 nt, synthetic construct
  source 1..22: mol_type = other RNA
ctggagtctaagatatctgtag

SEQ ID NO: 3644 - RNA, 22 nt, synthetic construct
  source 1..22: mol_type = other RNA
tggagtctaagatatctgtagg

SEQ ID NO: 3645 - RNA, 22 nt, synthetic construct
  source 1..22: mol_type = other RNA
ggagtctaagatatctgtaggt

SEQ ID NO: 3646 - RNA, 22 nt, synthetic construct
  source 1..22: mol_type = other RNA
gagtctaagatatctgtaggta

SEQ ID NO: 3647 - RNA, 22 nt, synthetic construct
  source 1..22: mol_type = other RNA
agtctaagatatctgtaggtat

SEQ ID NO: 3648 - RNA, 22 nt, synthetic construct
  source 1..22: mol_type = other RNA
gtctaagatatctgtaggtatg

SEQ ID NO: 3649 - RNA, 22 nt, synthetic construct
  source 1..22: mol_type = other RNA
tctaagatatctgtaggtatgg

SEQ ID NO: 3650 - RNA, 22 nt, synthetic construct
  source 1..22: mol_type = other RNA
ctaagatatctgtaggtatgga

SEQ ID NO: 3651 - RNA, 22 nt, synthetic construct
  source 1..22: mol_type = other RNA
taagatatctgtaggtatggag

SEQ ID NO: 3652 - RNA, 22 nt, synthetic construct
  source 1..22: mol_type = other RNA
aagatatctgtaggtatggaga

SEQ ID NO: 3653 - RNA, 22 nt, synthetic construct
  source 1..22: mol_type = other RNA
agatatctgtaggtatggagaa

SEQ ID NO: 3654 - RNA, 22 nt, synthetic construct
  source 1..22: mol_type = other RNA
gatatctgtaggtatggagaac

SEQ ID NO: 3655 - RNA, 22 nt, synthetic construct
  source 1..22: mol_type = other RNA
atatctgtaggtatggagaacc

SEQ ID NO: 3656 - RNA, 22 nt, synthetic construct
  source 1..22: mol_type = other RNA
tatctgtaggtatggagaaccc

SEQ ID NO: 3657 - RNA, 22 nt, synthetic construct
  source 1..22: mol_type = other RNA
atctgtaggtatggagaaccct

SEQ ID NO: 3658 - RNA, 22 nt, synthetic construct
  source 1..22: mol_type = other RNA
tctgtaggtatggagaaccctt

SEQ ID NO: 3659 - RNA, 22 nt, synthetic construct
  source 1..22: mol_type = other RNA
ctgtaggtatggagaacccttt

SEQ ID NO: 3660 - RNA, 22 nt, synthetic construct
  source 1..22: mol_type = other RNA
tgtaggtatggagaaccctttt

SEQ ID NO: 3661 - RNA, 22 nt, synthetic construct
  source 1..22: mol_type = other RNA
gtaggtatggagaacccttttt

SEQ ID NO: 3662 - RNA, 22 nt, synthetic construct
  source 1..22: mol_type = other RNA
taggtatggagaacccttttta

SEQ ID NO: 3663 - RNA, 22 nt, synthetic construct
  source 1..22: mol_type = other RNA
aggtatggagaaccctttttag

SEQ ID NO: 3664 - RNA, 22 nt, synthetic construct
  source 1..22: mol_type = other RNA
ggtatggagaaccctttttaga

SEQ ID NO: 3665 - RNA, 22 nt, synthetic construct
  source 1..22: mol_type = other RNA
gtatggagaaccctttttagac

SEQ ID NO: 3666 - RNA, 22 nt, synthetic construct
  source 1..22: mol_type = other RNA
tatggagaaccctttttagact

SEQ ID NO: 3667 - RNA, 22 nt, synthetic construct
  source 1..22: mol_type = other RNA
atggagaaccctttttagactg

SEQ ID NO: 3668 - RNA, 22 nt, synthetic construct
  source 1..22: mol_type = other RNA
tggagaaccctttttagactgg

SEQ ID NO: 3669 - RNA, 22 nt, synthetic construct
  source 1..22: mol_type = other RNA
ggagaaccctttttagactgga

SEQ ID NO: 3670 - RNA, 22 nt, synthetic construct
  source 1..22: mol_type = other RNA
gagaaccctttttagactggat

SEQ ID NO: 3671 - RNA, 22 nt, synthetic construct
  source 1..22: mol_type = other RNA
agaaccctttttagactggatt

SEQ ID NO: 3672 - RNA, 22 nt, synthetic construct
  source 1..22: mol_type = other RNA
gaaccctttttagactggattt

SEQ ID NO: 3673 - RNA, 22 nt, synthetic construct
  source 1..22: mol_type = other RNA
aaccctttttagactggatttt

SEQ ID NO: 3674 - RNA, 22 nt, synthetic construct
  source 1..22: mol_type = other RNA
accctttttagactggattttc

SEQ ID NO: 3675 - RNA, 22 nt, synthetic construct
  source 1..22: mol_type = other RNA
ccctttttagactggattttca

SEQ ID NO: 3676 - RNA, 22 nt, synthetic construct
  source 1..22: mol_type = other RNA
cctttttagactggattttcag

SEQ ID NO: 3677 - RNA, 22 nt, synthetic construct
  source 1..22: mol_type = other RNA
ctttttagactggattttcaga

SEQ ID NO: 3678 - RNA, 22 nt, synthetic construct
  source 1..22: mol_type = other RNA
tttttagactggattttcagat

SEQ ID NO: 3679 - RNA, 22 nt, synthetic construct
  source 1..22: mol_type = other RNA
ttttagactggattttcagatt

SEQ ID NO: 3680 - RNA, 22 nt, synthetic construct
  source 1..22: mol_type = other RNA
tttagactggattttcagattt

SEQ ID NO: 3681 - RNA, 22 nt, synthetic construct
  source 1..22: mol_type = other RNA
ttagactggattttcagatttt

SEQ ID NO: 3682 - RNA, 22 nt, synthetic construct
  source 1..22: mol_type = other RNA
tagactggattttcagattttg

SEQ ID NO: 3683 - RNA, 22 nt, synthetic construct
  source 1..22: mol_type = other RNA
agactggattttcagattttga

SEQ ID NO: 3684 - RNA, 22 nt, synthetic construct
  source 1..22: mol_type = other RNA
gactggattttcagattttgat

SEQ ID NO: 3685 - RNA, 22 nt, synthetic construct
  source 1..22: mol_type = other RNA
actggattttcagattttgata

SEQ ID NO: 3686 - RNA, 22 nt, synthetic construct
  source 1..22: mol_type = other RNA
ctggattttcagattttgatat

SEQ ID NO: 3687 - RNA, 22 nt, synthetic construct
  source 1..22: mol_type = other RNA
tggattttcagattttgatatt

SEQ ID NO: 3688 - RNA, 22 nt, synthetic construct
  source 1..22: mol_type = other RNA
ggattttcagattttgatattg

SEQ ID NO: 3689 - RNA, 22 nt, synthetic construct
  source 1..22: mol_type = other RNA
gattttcagattttgatattga

SEQ ID NO: 3690 - RNA, 22 nt, synthetic construct
  source 1..22: mol_type = other RNA
attttcagattttgatattgag

SEQ ID NO: 3691 - RNA, 22 nt, synthetic construct
  source 1..22: mol_type = other RNA
ttttcagattttgatattgagc

SEQ ID NO: 3692 - RNA, 22 nt, synthetic construct
  source 1..22: mol_type = other RNA
tttcagattttgatattgagct

SEQ ID NO: 3693 - RNA, 22 nt, synthetic construct
  source 1..22: mol_type = other RNA
ttcagattttgatattgagctt

SEQ ID NO: 3694 - RNA, 22 nt, synthetic construct
  source 1..22: mol_type = other RNA
tcagattttgatattgagcttc

SEQ ID NO: 3695 - RNA, 22 nt, synthetic construct
  source 1..22: mol_type = other RNA
cagattttgatattgagcttct

SEQ ID NO: 3696 - RNA, 22 nt, synthetic construct
  source 1..22: mol_type = other RNA
agattttgatattgagcttctc

SEQ ID NO: 3697 - RNA, 22 nt, synthetic construct
  source 1..22: mol_type = other RNA
gattttgatattgagcttctct

SEQ ID NO: 3698 - RNA, 22 nt, synthetic construct
  source 1..22: mol_type = other RNA
attttgatattgagcttctctc

SEQ ID NO: 3699 - RNA, 22 nt, synthetic construct
  source 1..22: mol_type = other RNA
ttttgatattgagcttctctct

SEQ ID NO: 3700 - RNA, 22 nt, synthetic construct
  source 1..22: mol_type = other RNA
tttgatattgagcttctctctc

SEQ ID NO: 3701 - RNA, 22 nt, synthetic construct
  source 1..22: mol_type = other RNA
ttgatattgagcttctctctct

SEQ ID NO: 3702 - RNA, 22 nt, synthetic construct
  source 1..22: mol_type = other RNA
tgatattgagcttctctctctg

SEQ ID NO: 3703 - RNA, 22 nt, synthetic construct
  source 1..22: mol_type = other RNA
gatattgagcttctctctctgg

SEQ ID NO: 3704 - RNA, 22 nt, synthetic construct
  source 1..22: mol_type = other RNA
atattgagcttctctctctggg

SEQ ID NO: 3705 - RNA, 22 nt, synthetic construct
  source 1..22: mol_type = other RNA
tattgagcttctctctctgggg

SEQ ID NO: 3706 - RNA, 22 nt, synthetic construct
  source 1..22: mol_type = other RNA
attgagcttctctctctggggg

SEQ ID NO: 3707 - RNA, 22 nt, synthetic construct
  source 1..22: mol_type = other RNA
ttgagcttctctctctggggga

SEQ ID NO: 3708 - RNA, 22 nt, synthetic construct
  source 1..22: mol_type = other RNA
tgagcttctctctctgggggat

SEQ ID NO: 3709 - RNA, 22 nt, synthetic construct
  source 1..22: mol_type = other RNA
gagcttctctctctgggggatc

SEQ ID NO: 3710 - RNA, 22 nt, synthetic construct
  source 1..22: mol_type = other RNA
agcttctctctctgggggatct

SEQ ID NO: 3711 - RNA, 22 nt, synthetic construct
  source 1..22: mol_type = other RNA
gcttctctctctgggggatctg

SEQ ID NO: 3712 - RNA, 22 nt, synthetic construct
  source 1..22: mol_type = other RNA
cttctctctctgggggatctgg

SEQ ID NO: 3713 - RNA, 22 nt, synthetic construct
  source 1..22: mol_type = other RNA
ttctctctctgggggatctggg

SEQ ID NO: 3714 - RNA, 22 nt, synthetic construct
  source 1..22: mol_type = other RNA
tctctctctgggggatctgggg

SEQ ID NO: 3715 - RNA, 22 nt, synthetic construct
  source 1..22: mol_type = other RNA
ctctctctgggggatctggggt

SEQ ID NO: 3716 - RNA, 22 nt, synthetic construct
  source 1..22: mol_type = other RNA
tctctctgggggatctggggtc

SEQ ID NO: 3717 - RNA, 22 nt, synthetic construct
  source 1..22: mol_type = other RNA
ctctctgggggatctggggtcg

SEQ ID NO: 3718 - RNA, 22 nt, synthetic construct
  source 1..22: mol_type = other RNA
tctctgggggatctggggtcgt

SEQ ID NO: 3719 - RNA, 22 nt, synthetic construct
  source 1..22: mol_type = other RNA
ctctgggggatctggggtcgtt

SEQ ID NO: 3720 - RNA, 22 nt, synthetic construct
  source 1..22: mol_type = other RNA
tctgggggatctggggtcgttt

SEQ ID NO: 3721 - RNA, 22 nt, synthetic construct
  source 1..22: mol_type = other RNA
ctgggggatctggggtcgtttt

SEQ ID NO: 3722 - RNA, 22 nt, synthetic construct
  source 1..22: mol_type = other RNA
tgggggatctggggtcgttttt

SEQ ID NO: 3723 - RNA, 22 nt, synthetic construct
  source 1..22: mol_type = other RNA
gggggatctggggtcgtttttt

SEQ ID NO: 3724 - RNA, 22 nt, synthetic construct
  source 1..22: mol_type = other RNA
ggggatctggggtcgttttttc

SEQ ID NO: 3725 - RNA, 22 nt, synthetic construct
  source 1..22: mol_type = other RNA
gggatctggggtcgttttttcc

SEQ ID NO: 3726 - RNA, 22 nt, synthetic construct
  source 1..22: mol_type = other RNA
ggatctggggtcgttttttcct

SEQ ID NO: 3727 - RNA, 22 nt, synthetic construct
  source 1..22: mol_type = other RNA
gatctggggtcgttttttcctc

SEQ ID NO: 3728 - RNA, 22 nt, synthetic construct
  source 1..22: mol_type = other RNA
atctggggtcgttttttcctca

SEQ ID NO: 3729 - RNA, 22 nt, synthetic construct
  source 1..22: mol_type = other RNA
tctggggtcgttttttcctcaa

SEQ ID NO: 3730 - RNA, 22 nt, synthetic construct
  source 1..22: mol_type = other RNA
ctggggtcgttttttcctcaaa

SEQ ID NO: 3731 - RNA, 22 nt, synthetic construct
  source 1..22: mol_type = other RNA
tggggtcgttttttcctcaaat

SEQ ID NO: 3732 - RNA, 22 nt, synthetic construct
  source 1..22: mol_type = other RNA
ggggtcgttttttcctcaaatc

SEQ ID NO: 3733 - RNA, 22 nt, synthetic construct
  source 1..22: mol_type = other RNA
gggtcgttttttcctcaaatca

SEQ ID NO: 3734 - RNA, 22 nt, synthetic construct
  source 1..22: mol_type = other RNA
ggtcgttttttcctcaaatcag

SEQ ID NO: 3735 - RNA, 22 nt, synthetic construct
  source 1..22: mol_type = other RNA
gtcgttttttcctcaaatcagg

SEQ ID NO: 3736 - RNA, 22 nt, synthetic construct
  source 1..22: mol_type = other RNA
tcgttttttcctcaaatcagga

SEQ ID NO: 3737 - RNA, 22 nt, synthetic construct
  source 1..22: mol_type = other RNA
cgttttttcctcaaatcaggag

SEQ ID NO: 3738 - RNA, 22 nt, synthetic construct
  source 1..22: mol_type = other RNA
gttttttcctcaaatcaggagt

SEQ ID NO: 3739 - RNA, 22 nt, synthetic construct
  source 1..22: mol_type = other RNA
ttttttcctcaaatcaggagtc

SEQ ID NO: 3740 - RNA, 22 nt, synthetic construct
  source 1..22: mol_type = other RNA
tttttcctcaaatcaggagtct

SEQ ID NO: 3741 - RNA, 22 nt, synthetic construct
  source 1..22: mol_type = other RNA
ttttcctcaaatcaggagtctc

SEQ ID NO: 3742 - RNA, 22 nt, synthetic construct
  source 1..22: mol_type = other RNA
tttcctcaaatcaggagtctct

SEQ ID NO: 3743 - RNA, 22 nt, synthetic construct
  source 1..22: mol_type = other RNA
ttcctcaaatcaggagtctctt

SEQ ID NO: 3744 - RNA, 22 nt, synthetic construct
  source 1..22: mol_type = other RNA
tcctcaaatcaggagtctcttt

SEQ ID NO: 3745 - RNA, 22 nt, synthetic construct
  source 1..22: mol_type = other RNA
cctcaaatcaggagtctctttt

SEQ ID NO: 3746 - RNA, 22 nt, synthetic construct
  source 1..22: mol_type = other RNA
ctcaaatcaggagtctcttttc

SEQ ID NO: 3747 - RNA, 22 nt, synthetic construct
  source 1..22: mol_type = other RNA
tcaaatcaggagtctcttttcc

SEQ ID NO: 3748 - RNA, 22 nt, synthetic construct
  source 1..22: mol_type = other RNA
caaatcaggagtctcttttcct

SEQ ID NO: 3749 - RNA, 22 nt, synthetic construct
  source 1..22: mol_type = other RNA
atcaggagtctcttttcctcta

SEQ ID NO: 3750 - RNA, 22 nt, synthetic construct
  source 1..22: mol_type = other RNA
tcaggagtctcttttcctctag

SEQ ID NO: 3751 - RNA, 22 nt, synthetic construct
  source 1..22: mol_type = other RNA
caggagtctcttttcctctaga

SEQ ID NO: 3752 - RNA, 22 nt, synthetic construct
  source 1..22: mol_type = other RNA
aggagtctcttttcctctagat

SEQ ID NO: 3753 - RNA, 22 nt, synthetic construct
  source 1..22: mol_type = other RNA
ggagtctcttttcctctagatt

SEQ ID NO: 3754 - RNA, 22 nt, synthetic construct
  source 1..22: mol_type = other RNA
gagtctcttttcctctagattt

SEQ ID NO: 3755 - RNA, 22 nt, synthetic construct
  source 1..22: mol_type = other RNA
agtctcttttcctctagatttt

SEQ ID NO: 3756 - RNA, 22 nt, synthetic construct
  source 1..22: mol_type = other RNA
tctcttttcctctagattttgg

SEQ ID NO: 3757 - RNA, 22 nt, synthetic construct
  source 1..22: mol_type = other RNA
ctcttttcctctagattttggc

SEQ ID NO: 3758 - RNA, 22 nt, synthetic construct
  source 1..22: mol_type = other RNA
tcttttcctctagattttggcc

SEQ ID NO: 3759 - RNA, 22 nt, synthetic construct
  source 1..22: mol_type = other RNA
cttttcctctagattttggccc

SEQ ID NO: 3760 - RNA, 22 nt, synthetic construct
  source 1..22: mol_type = other RNA
ttttcctctagattttggccct

SEQ ID NO: 3761 - RNA, 22 nt, synthetic construct
  source 1..22: mol_type = other RNA
tttcctctagattttggccctg

SEQ ID NO: 3762 - RNA, 22 nt, synthetic construct
  source 1..22: mol_type = other RNA
ttcctctagattttggccctgt

SEQ ID NO: 3763 - RNA, 22 nt, synthetic construct
  source 1..22: mol_type = other RNA
tcctctagattttggccctgtg

SEQ ID NO: 3764 - RNA, 22 nt, synthetic construct
  source 1..22: mol_type = other RNA
cctctagattttggccctgtgt

SEQ ID NO: 3765 - RNA, 22 nt, synthetic construct
  source 1..22: mol_type = other RNA
ctctagattttggccctgtgtc

SEQ ID NO: 3766 - RNA, 22 nt, synthetic construct
  source 1..22: mol_type = other RNA
tctagattttggccctgtgtct

SEQ ID NO: 3767 - RNA, 22 nt, synthetic construct
  source 1..22: mol_type = other RNA
ctagattttggccctgtgtctc

SEQ ID NO: 3768 - RNA, 22 nt, synthetic construct
  source 1..22: mol_type = other RNA
tagattttggccctgtgtctca

SEQ ID NO: 3769 - RNA, 22 nt, synthetic construct
  source 1..22: mol_type = other RNA
agattttggccctgtgtctcaa

SEQ ID NO: 3770 - RNA, 22 nt, synthetic construct
  source 1..22: mol_type = other RNA
gattttggccctgtgtctcaaa

SEQ ID NO: 3771 - RNA, 22 nt, synthetic construct
  source 1..22: mol_type = other RNA
attttggccctgtgtctcaaat

SEQ ID NO: 3772 - RNA, 22 nt, synthetic construct
  source 1..22: mol_type = other RNA
ttttggccctgtgtctcaaatt

SEQ ID NO: 3773 - RNA, 22 nt, synthetic construct
  source 1..22: mol_type = other RNA
tttggccctgtgtctcaaatta

SEQ ID NO: 3774 - RNA, 22 nt, synthetic construct
  source 1..22: mol_type = other RNA
ttggccctgtgtctcaaattac

SEQ ID NO: 3775 - RNA, 22 nt, synthetic construct
  source 1..22: mol_type = other RNA
tggccctgtgtctcaaattacc

SEQ ID NO: 3776 - RNA, 22 nt, synthetic construct
  source 1..22: mol_type = other RNA
ggccctgtgtctcaaattaccc

SEQ ID NO: 3777 - RNA, 22 nt, synthetic construct
  source 1..22: mol_type = other RNA
gccctgtgtctcaaattacccc

SEQ ID NO: 3778 - RNA, 22 nt, synthetic construct
  source 1..22: mol_type = other RNA
ccctgtgtctcaaattacccca

SEQ ID NO: 3779 - RNA, 22 nt, synthetic construct
  source 1..22: mol_type = other RNA
cctgtgtctcaaattaccccac

SEQ ID NO: 3780 - RNA, 22 nt, synthetic construct
  source 1..22: mol_type = other RNA
ctgtgtctcaaattaccccaca

SEQ ID NO: 3781 - RNA, 22 nt, synthetic construct
  source 1..22: mol_type = other RNA
tgtgtctcaaattaccccacag

SEQ ID NO: 3782 - RNA, 22 nt, synthetic construct
  source 1..22: mol_type = other RNA
gtgtctcaaattaccccacagt

SEQ ID NO: 3783 - RNA, 22 nt, synthetic construct
  source 1..22: mol_type = other RNA
tgtctcaaattaccccacagtg

SEQ ID NO: 3784 - RNA, 22 nt, synthetic construct
  source 1..22: mol_type = other RNA
gtctcaaattaccccacagtgg

SEQ ID NO: 3785 - RNA, 22 nt, synthetic construct
  source 1..22: mol_type = other RNA
tctcaaattaccccacagtggg

SEQ ID NO: 3786 - RNA, 22 nt, synthetic construct
  source 1..22: mol_type = other RNA
ctcaaattaccccacagtgggg

SEQ ID NO: 3787 - RNA, 22 nt, synthetic construct
  source 1..22: mol_type = other RNA
tcaaattaccccacagtggggg

SEQ ID NO: 3788 - RNA, 22 nt, synthetic construct
  source 1..22: mol_type = other RNA
caaattaccccacagtgggggg

SEQ ID NO: 3789 - RNA, 22 nt, synthetic construct
  source 1..22: mol_type = other RNA
aaattaccccacagtggggggt

SEQ ID NO: 3790 - RNA, 22 nt, synthetic construct
  source 1..22: mol_type = other RNA
aattaccccacagtggggggtg

SEQ ID NO: 3791 - RNA, 22 nt, synthetic construct
  source 1..22: mol_type = other RNA
attaccccacagtggggggtgg

SEQ ID NO: 3792 - RNA, 22 nt, synthetic construct
  source 1..22: mol_type = other RNA
ttaccccacagtggggggtggt

SEQ ID NO: 3793 - RNA, 22 nt, synthetic construct
  source 1..22: mol_type = other RNA
taccccacagtggggggtggtg

SEQ ID NO: 3794 - RNA, 22 nt, synthetic construct
  source 1..22: mol_type = other RNA
accccacagtggggggtggtga

SEQ ID NO: 3795 - RNA, 22 nt, synthetic construct
  source 1..22: mol_type = other RNA
ccccacagtggggggtggtgaa

SEQ ID NO: 3796 - RNA, 22 nt, synthetic construct
  source 1..22: mol_type = other RNA
cccacagtggggggtggtgaag

SEQ ID NO: 3797 - RNA, 22 nt, synthetic construct
  source 1..22: mol_type = other RNA
ccacagtggggggtggtgaagt

SEQ ID NO: 3798 - RNA, 22 nt, synthetic construct
  source 1..22: mol_type = other RNA
cacagtggggggtggtgaagta

SEQ ID NO: 3799 - RNA, 22 nt, synthetic construct
  source 1..22: mol_type = other RNA
acagtggggggtggtgaagtat

SEQ ID NO: 3800 - RNA, 22 nt, synthetic construct
  source 1..22: mol_type = other RNA
cagtggggggtggtgaagtatc

SEQ ID NO: 3801 - RNA, 22 nt, synthetic construct
  source 1..22: mol_type = other RNA
agtggggggtggtgaagtatct

SEQ ID NO: 3802 - RNA, 22 nt, synthetic construct
  source 1..22: mol_type = other RNA
gtggggggtggtgaagtatctt

SEQ ID NO: 3803 - RNA, 22 nt, synthetic construct
  source 1..22: mol_type = other RNA
tggggggtggtgaagtatcttt

SEQ ID NO: 3804 - RNA, 22 nt, synthetic construct
  source 1..22: mol_type = other RNA
ggggggtggtgaagtatctttc

SEQ ID NO: 3805 - RNA, 22 nt, synthetic construct
  source 1..22: mol_type = other RNA
gggggtggtgaagtatctttct

SEQ ID NO: 3806 - RNA, 22 nt, synthetic construct
  source 1..22: mol_type = other RNA
ggggtggtgaagtatctttctc

SEQ ID NO: 3807 - RNA, 22 nt, synthetic construct
  source 1..22: mol_type = other RNA
gggtggtgaagtatctttctct

SEQ ID NO: 3808 - RNA, 22 nt, synthetic construct
  source 1..22: mol_type = other RNA
ggtggtgaagtatctttctctg

SEQ ID NO: 3809 - RNA, 22 nt, synthetic construct
  source 1..22: mol_type = other RNA
gtggtgaagtatctttctctgt

SEQ ID NO: 3810 - RNA, 22 nt, synthetic construct
  source 1..22: mol_type = other RNA
tggtgaagtatctttctctgtg

SEQ ID NO: 3811 - RNA, 22 nt, synthetic construct
  source 1..22: mol_type = other RNA
ggtgaagtatctttctctgtgg

SEQ ID NO: 3812 - RNA, 22 nt, synthetic construct
  source 1..22: mol_type = other RNA
gtgaagtatctttctctgtggg

SEQ ID NO: 3813 - RNA, 22 nt, synthetic construct
  source 1..22: mol_type = other RNA
tgaagtatctttctctgtgggt

SEQ ID NO: 3814 - RNA, 22 nt, synthetic construct
  source 1..22: mol_type = other RNA
gaagtatctttctctgtgggtc

SEQ ID NO: 3815 - RNA, 22 nt, synthetic construct
  source 1..22: mol_type = other RNA
aagtatctttctctgtgggtct

SEQ ID NO: 3816 - RNA, 22 nt, synthetic construct
  source 1..22: mol_type = other RNA
agtatctttctctgtgggtcta

SEQ ID NO: 3817 - RNA, 22 nt, synthetic construct
  source 1..22: mol_type = other RNA
gtatctttctctgtgggtctag

SEQ ID NO: 3818 - RNA, 22 nt, synthetic construct
  source 1..22: mol_type = other RNA
tatctttctctgtgggtctagg

SEQ ID NO: 3819 - RNA, 22 nt, synthetic construct
  source 1..22: mol_type = other RNA
atctttctctgtgggtctaggg

SEQ ID NO: 3820 - RNA, 22 nt, synthetic construct
  source 1..22: mol_type = other RNA
tctttctctgtgggtctagggt

SEQ ID NO: 3821 - RNA, 22 nt, synthetic construct
  source 1..22: mol_type = other RNA
ctttctctgtgggtctagggtc

SEQ ID NO: 3822 - RNA, 22 nt, synthetic construct
  source 1..22: mol_type = other RNA
tttctctgtgggtctagggtct

SEQ ID NO: 3823 - RNA, 22 nt, synthetic construct
  source 1..22: mol_type = other RNA
ttctctgtgggtctagggtctc

SEQ ID NO: 3824 - RNA, 22 nt, synthetic construct
  source 1..22: mol_type = other RNA
tctctgtgggtctagggtctct

SEQ ID NO: 3825 - RNA, 22 nt, synthetic construct
  source 1..22: mol_type = other RNA
ctctgtgggtctagggtctctc

SEQ ID NO: 3826 - RNA, 22 nt, synthetic construct
  source 1..22: mol_type = other RNA
tctgtgggtctagggtctctct

SEQ ID NO: 3827 - RNA, 22 nt, synthetic construct
  source 1..22: mol_type = other RNA
ctgtgggtctagggtctctctg

SEQ ID NO: 3828 - RNA, 22 nt, synthetic construct
  source 1..22: mol_type = other RNA
tgtgggtctagggtctctctgt

SEQ ID NO: 3829 - RNA, 22 nt, synthetic construct
  source 1..22: mol_type = other RNA
gtgggtctagggtctctctgtc

SEQ ID NO: 3830 - RNA, 22 nt, synthetic construct
  source 1..22: mol_type = other RNA
tgggtctagggtctctctgtct

SEQ ID NO: 3831 - RNA, 22 nt, synthetic construct
  source 1..22: mol_type = other RNA
gggtctagggtctctctgtctc

SEQ ID NO: 3832 - RNA, 22 nt, synthetic construct
  source 1..22: mol_type = other RNA
ggtctagggtctctctgtctca

SEQ ID NO: 3833 - RNA, 22 nt, synthetic construct
  source 1..22: mol_type = other RNA
gtctagggtctctctgtctcag

SEQ ID NO: 3834 - RNA, 22 nt, synthetic construct
  source 1..22: mol_type = other RNA
tctagggtctctctgtctcagg

SEQ ID NO: 3835 - RNA, 22 nt, synthetic construct
  source 1..22: mol_type = other RNA
ctagggtctctctgtctcaggg

SEQ ID NO: 3836 - RNA, 22 nt, synthetic construct
  source 1..22: mol_type = other RNA
tagggtctctctgtctcagggt

SEQ ID NO: 3837 - RNA, 22 nt, synthetic construct
  source 1..22: mol_type = other RNA
agggtctctctgtctcagggtc

SEQ ID NO: 3838 - RNA, 22 nt, synthetic construct
  source 1..22: mol_type = other RNA
gggtctctctgtctcagggtct

SEQ ID NO: 3839 - RNA, 22 nt, synthetic construct
  source 1..22: mol_type = other RNA
ggtctctctgtctcagggtctg

SEQ ID NO: 3840 - RNA, 22 nt, synthetic construct
  source 1..22: mol_type = other RNA
gtctctctgtctcagggtctgg

SEQ ID NO: 3841 - RNA, 22 nt, synthetic construct
  source 1..22: mol_type = other RNA
tctctctgtctcagggtctggg

SEQ ID NO: 3842 - RNA, 22 nt, synthetic construct
  source 1..22: mol_type = other RNA
ctctctgtctcagggtctgggg

SEQ ID NO: 3843 - RNA, 22 nt, synthetic construct
  source 1..22: mol_type = other RNA
tctctgtctcagggtctggggt

SEQ ID NO: 3844 - RNA, 22 nt, synthetic construct
  source 1..22: mol_type = other RNA
ctctgtctcagggtctggggtc

SEQ ID NO: 3845 - RNA, 22 nt, synthetic construct
  source 1..22: mol_type = other RNA
tctgtctcagggtctggggtct

SEQ ID NO: 3846 - RNA, 22 nt, synthetic construct
  source 1..22: mol_type = other RNA
ctgtctcagggtctggggtctg

SEQ ID NO: 3847 - RNA, 22 nt, synthetic construct
  source 1..22: mol_type = other RNA
tgtctcagggtctggggtctgc

SEQ ID NO: 3848 - RNA, 22 nt, synthetic construct
  source 1..22: mol_type = other RNA
gtctcagggtctggggtctgca

SEQ ID NO: 3849 - RNA, 22 nt, synthetic construct
  source 1..22: mol_type = other RNA
tctcagggtctggggtctgcat

SEQ ID NO: 3850 - RNA, 22 nt, synthetic construct
  source 1..22: mol_type = other RNA
ctcagggtctggggtctgcatc

SEQ ID NO: 3851 - RNA, 22 nt, synthetic construct
  source 1..22: mol_type = other RNA
tcagggtctggggtctgcatct

SEQ ID NO: 3852 - RNA, 22 nt, synthetic construct
  source 1..22: mol_type = other RNA
cagggtctggggtctgcatctt

SEQ ID NO: 3853 - RNA, 22 nt, synthetic construct
  source 1..22: mol_type = other RNA
agggtctggggtctgcatcttt

SEQ ID NO: 3854 - RNA, 22 nt, synthetic construct
  source 1..22: mol_type = other RNA
gggtctggggtctgcatcttta

SEQ ID NO: 3855 - RNA, 22 nt, synthetic construct
  source 1..22: mol_type = other RNA
ggtctggggtctgcatctttag

SEQ ID NO: 3856 - RNA, 22 nt, synthetic construct
  source 1..22: mol_type = other RNA
gtctggggtctgcatctttagg

SEQ ID NO: 3857 - RNA, 22 nt, synthetic construct
  source 1..22: mol_type = other RNA
tctggggtctgcatctttagga

SEQ ID NO: 3858 - RNA, 22 nt, synthetic construct
  source 1..22: mol_type = other RNA
ctggggtctgcatctttaggac

SEQ ID NO: 3859 - RNA, 22 nt, synthetic construct
  source 1..22: mol_type = other RNA
tggggtctgcatctttaggacc

SEQ ID NO: 3860 - RNA, 22 nt, synthetic construct
  source 1..22: mol_type = other RNA
ggggtctgcatctttaggacct

SEQ ID NO: 3861 - RNA, 22 nt, synthetic construct
  source 1..22: mol_type = other RNA
gggtctgcatctttaggacctc

SEQ ID NO: 3862 - RNA, 22 nt, synthetic construct
  source 1..22: mol_type = other RNA
ggtctgcatctttaggacctct

SEQ ID NO: 3863 - RNA, 22 nt, synthetic construct
  source 1..22: mol_type = other RNA
tctgcatctttaggacctctgt

SEQ ID NO: 3864 - RNA, 22 nt, synthetic construct
  source 1..22: mol_type = other RNA
ctgcatctttaggacctctgtc

SEQ ID NO: 3865 - RNA, 22 nt, synthetic construct
  source 1..22: mol_type = other RNA
tgcatctttaggacctctgtct

SEQ ID NO: 3866 - RNA, 22 nt, synthetic construct
  source 1..22: mol_type = other RNA
gcatctttaggacctctgtctc

SEQ ID NO: 3867 - RNA, 22 nt, synthetic construct
  source 1..22: mol_type = other RNA
catctttaggacctctgtctct

SEQ ID NO: 3868 - RNA, 22 nt, synthetic construct
  source 1..22: mol_type = other RNA
atctttaggacctctgtctctc

SEQ ID NO: 3869 - RNA, 22 nt, synthetic construct
  source 1..22: mol_type = other RNA
tctttaggacctctgtctctct

SEQ ID NO: 3870 - RNA, 22 nt, synthetic construct
  source 1..22: mol_type = other RNA
ctttaggacctctgtctctctc

SEQ ID NO: 3871 - RNA, 22 nt, synthetic construct
  source 1..22: mol_type = other RNA
tttaggacctctgtctctctct

SEQ ID NO: 3872 - RNA, 22 nt, synthetic construct
  source 1..22: mol_type = other RNA
ttaggacctctgtctctctctg

SEQ ID NO: 3873 - RNA, 22 nt, synthetic construct
  source 1..22: mol_type = other RNA
taggacctctgtctctctctgg

SEQ ID NO: 3874 - RNA, 22 nt, synthetic construct
  source 1..22: mol_type = other RNA
aggacctctgtctctctctggt

SEQ ID NO: 3875 - RNA, 22 nt, synthetic construct
  source 1..22: mol_type = other RNA
ggacctctgtctctctctggtg

SEQ ID NO: 3876 - RNA, 22 nt, synthetic construct
  source 1..22: mol_type = other RNA
acctctgtctctctctggtgtg

SEQ ID NO: 3877 - RNA, 22 nt, synthetic construct
  source 1..22: mol_type = other RNA
cctctgtctctctctggtgtgt

SEQ ID NO: 3878 - RNA, 22 nt, synthetic construct
  source 1..22: mol_type = other RNA
ctctgtctctctctggtgtgtt

SEQ ID NO: 3879 - RNA, 22 nt, synthetic construct
  source 1..22: mol_type = other RNA
tctgtctctctctggtgtgttt

SEQ ID NO: 3880 - RNA, 23 nt, synthetic construct
  source 1..23: mol_type = other RNA
gggtctggagtctaagatatctg

SEQ ID NO: 3881 - RNA, 23 nt, synthetic construct
  source 1..23: mol_type = other RNA
ggtctggagtctaagatatctgt

SEQ ID NO: 3882 - RNA, 23 nt, synthetic construct
  source 1..23: mol_type = other RNA
gtctggagtctaagatatctgta

SEQ ID NO: 3883 - RNA, 23 nt, synthetic construct
  source 1..23: mol_type = other RNA
tctggagtctaagatatctgtag

SEQ ID NO: 3884 - RNA, 23 nt, synthetic construct
  source 1..23: mol_type = other RNA
ctggagtctaagatatctgtagg

SEQ ID NO: 3885 - RNA, 23 nt, synthetic construct
  source 1..23: mol_type = other RNA
tggagtctaagatatctgtaggt

SEQ ID NO: 3886 - RNA, 23 nt, synthetic construct
  source 1..23: mol_type = other RNA
ggagtctaagatatctgtaggta

SEQ ID NO: 3887 - RNA, 23 nt, synthetic construct
  source 1..23: mol_type = other RNA
gagtctaagatatctgtaggtat

SEQ ID NO: 3888 - RNA, 23 nt, synthetic construct
  source 1..23: mol_type = other RNA
agtctaagatatctgtaggtatg

SEQ ID NO: 3889 - RNA, 23 nt, synthetic construct
  source 1..23: mol_type = other RNA
gtctaagatatctgtaggtatgg

SEQ ID NO: 3890 - RNA, 23 nt, synthetic construct
  source 1..23: mol_type = other RNA
tctaagatatctgtaggtatgga

SEQ ID NO: 3891 - RNA, 23 nt, synthetic construct
  source 1..23: mol_type = other RNA
ctaagatatctgtaggtatggag

SEQ ID NO: 3892 - RNA, 23 nt, synthetic construct
  source 1..23: mol_type = other RNA
taagatatctgtaggtatggaga

SEQ ID NO: 3893 - RNA, 23 nt, synthetic construct
  source 1..23: mol_type = other RNA
aagatatctgtaggtatggagaa

SEQ ID NO: 3894 - RNA, 23 nt, synthetic construct
  source 1..23: mol_type = other RNA
agatatctgtaggtatggagaac

SEQ ID NO: 3895 - RNA, 23 nt, synthetic construct
  source 1..23: mol_type = other RNA
gatatctgtaggtatggagaacc

SEQ ID NO: 3896 - RNA, 23 nt, synthetic construct
  source 1..23: mol_type = other RNA
atatctgtaggtatggagaaccc

SEQ ID NO: 3897 - RNA, 23 nt, synthetic construct
  source 1..23: mol_type = other RNA
tatctgtaggtatggagaaccct

SEQ ID NO: 3898 - RNA, 23 nt, synthetic construct
  source 1..23: mol_type = other RNA
atctgtaggtatggagaaccctt

SEQ ID NO: 3899 - RNA, 23 nt, synthetic construct
  source 1..23: mol_type = other RNA
tctgtaggtatggagaacccttt

SEQ ID NO: 3900 - RNA, 23 nt, synthetic construct
  source 1..23: mol_type = other RNA
ctgtaggtatggagaaccctttt

SEQ ID NO: 3901 - RNA, 23 nt, synthetic construct
  source 1..23: mol_type = other RNA
tgtaggtatggagaacccttttt

SEQ ID NO: 3902 - RNA, 23 nt, synthetic construct
  source 1..23: mol_type = other RNA
gtaggtatggagaacccttttta

SEQ ID NO: 3903 - RNA, 23 nt, synthetic construct
  source 1..23: mol_type = other RNA
taggtatggagaaccctttttag

SEQ ID NO: 3904 - RNA, 23 nt, synthetic construct
  source 1..23: mol_type = other RNA
aggtatggagaaccctttttaga

SEQ ID NO: 3905 - RNA, 23 nt, synthetic construct
  source 1..23: mol_type = other RNA
ggtatggagaaccctttttagac

SEQ ID NO: 3906 - RNA, 23 nt, synthetic construct
  source 1..23: mol_type = other RNA
gtatggagaaccctttttagact

SEQ ID NO: 3907 - RNA, 23 nt, synthetic construct
  source 1..23: mol_type = other RNA
tatggagaaccctttttagactg

SEQ ID NO: 3908 - RNA, 23 nt, synthetic construct
  source 1..23: mol_type = other RNA
atggagaaccctttttagactgg

SEQ ID NO: 3909 - RNA, 23 nt, synthetic construct
  source 1..23: mol_type = other RNA
tggagaaccctttttagactgga

SEQ ID NO: 3910 - RNA, 23 nt, synthetic construct
  source 1..23: mol_type = other RNA
ggagaaccctttttagactggat

SEQ ID NO: 3911 - RNA, 23 nt, synthetic construct
  source 1..23: mol_type = other RNA
gagaaccctttttagactggatt

SEQ ID NO: 3912 - RNA, 23 nt, synthetic construct
  source 1..23: mol_type = other RNA
agaaccctttttagactggattt

SEQ ID NO: 3913 - RNA, 23 nt, synthetic construct
  source 1..23: mol_type = other RNA
gaaccctttttagactggatttt

SEQ ID NO: 3914 - RNA, 23 nt, synthetic construct
  source 1..23: mol_type = other RNA
aaccctttttagactggattttc

SEQ ID NO: 3915 - RNA, 23 nt, synthetic construct
  source 1..23: mol_type = other RNA
accctttttagactggattttca

SEQ ID NO: 3916 - RNA, 23 nt, synthetic construct
  source 1..23: mol_type = other RNA
ccctttttagactggattttcag

SEQ ID NO: 3917 - RNA, 23 nt, synthetic construct
  source 1..23: mol_type = other RNA
cctttttagactggattttcaga

SEQ ID NO: 3918 - RNA, 23 nt, synthetic construct
  source 1..23: mol_type = other RNA
ctttttagactggattttcagat

SEQ ID NO: 3919 - RNA, 23 nt, synthetic construct
  source 1..23: mol_type = other RNA
tttttagactggattttcagatt

SEQ ID NO: 3920 - RNA, 23 nt, synthetic construct
  source 1..23: mol_type = other RNA
ttttagactggattttcagattt

SEQ ID NO: 3921 - RNA, 23 nt, synthetic construct
  source 1..23: mol_type = other RNA
tttagactggattttcagatttt

SEQ ID NO: 3922 - RNA, 23 nt, synthetic construct
  source 1..23: mol_type = other RNA
ttagactggattttcagattttg

SEQ ID NO: 3923 - RNA, 23 nt, synthetic construct
  source 1..23: mol_type = other RNA
tagactggattttcagattttga

SEQ ID NO: 3924 - RNA, 23 nt, synthetic construct
  source 1..23: mol_type = other RNA
agactggattttcagattttgat

SEQ ID NO: 3925 - RNA, 23 nt, synthetic construct
  source 1..23: mol_type = other RNA
gactggattttcagattttgata

SEQ ID NO: 3926 - RNA, 23 nt, synthetic construct
  source 1..23: mol_type = other RNA
actggattttcagattttgatat

SEQ ID NO: 3927 - RNA, 23 nt, synthetic construct
  source 1..23: mol_type = other RNA
ctggattttcagattttgatatt

SEQ ID NO: 3928 - RNA, 23 nt, synthetic construct
  source 1..23: mol_type = other RNA
tggattttcagattttgatattg

SEQ ID NO: 3929 - RNA, 23 nt, synthetic construct
  source 1..23: mol_type = other RNA
ggattttcagattttgatattga

SEQ ID NO: 3930 - RNA, 23 nt, synthetic construct
  source 1..23: mol_type = other RNA
gattttcagattttgatattgag

SEQ ID NO: 3931 - RNA, 23 nt, synthetic construct
  source 1..23: mol_type = other RNA
attttcagattttgatattgagc

SEQ ID NO: 3932 - RNA, 23 nt, synthetic construct
  source 1..23: mol_type = other RNA
ttttcagattttgatattgagct

SEQ ID NO: 3933 - RNA, 23 nt, synthetic construct
  source 1..23: mol_type = other RNA
tttcagattttgatattgagctt

SEQ ID NO: 3934 - RNA, 23 nt, synthetic construct
  source 1..23: mol_type = other RNA
ttcagattttgatattgagcttc

SEQ ID NO: 3935 - RNA, 23 nt, synthetic construct
  source 1..23: mol_type = other RNA
tcagattttgatattgagcttct

SEQ ID NO: 3936 - RNA, 23 nt, synthetic construct
  source 1..23: mol_type = other RNA
cagattttgatattgagcttctc

SEQ ID NO: 3937 - RNA, 23 nt, synthetic construct
  source 1..23: mol_type = other RNA
agattttgatattgagcttctct

SEQ ID NO: 3938 - RNA, 23 nt, synthetic construct
  source 1..23: mol_type = other RNA
gattttgatattgagcttctctc

SEQ ID NO: 3939 - RNA, 23 nt, synthetic construct
  source 1..23: mol_type = other RNA
attttgatattgagcttctctct

SEQ ID NO: 3940 - RNA, 23 nt, synthetic construct
  source 1..23: mol_type = other RNA
ttttgatattgagcttctctctc

SEQ ID NO: 3941 - RNA, 23 nt, synthetic construct
  source 1..23: mol_type = other RNA
tttgatattgagcttctctctct

SEQ ID NO: 3942 - RNA, 23 nt, synthetic construct
  source 1..23: mol_type = other RNA
ttgatattgagcttctctctctg

SEQ ID NO: 3943 - RNA, 23 nt, synthetic construct
  source 1..23: mol_type = other RNA
tgatattgagcttctctctctgg

SEQ ID NO: 3944 - RNA, 23 nt, synthetic construct
  source 1..23: mol_type = other RNA
gatattgagcttctctctctggg

SEQ ID NO: 3945 - RNA, 23 nt, synthetic construct
  source 1..23: mol_type = other RNA
atattgagcttctctctctgggg

SEQ ID NO: 3946 - RNA, 23 nt, synthetic construct
  source 1..23: mol_type = other RNA
tattgagcttctctctctggggg

SEQ ID NO: 3947 - RNA, 23 nt, synthetic construct
  source 1..23: mol_type = other RNA
attgagcttctctctctggggga

SEQ ID NO: 3948 - RNA, 23 nt, synthetic construct
  source 1..23: mol_type = other RNA
ttgagcttctctctctgggggat

SEQ ID NO: 3949 - RNA, 23 nt, synthetic construct
  source 1..23: mol_type = other RNA
tgagcttctctctctgggggatc

SEQ ID NO: 3950 - RNA, 23 nt, synthetic construct
  source 1..23: mol_type = other RNA
gagcttctctctctgggggatct

SEQ ID NO: 3951 - RNA, 23 nt, synthetic construct
  source 1..23: mol_type = other RNA
agcttctctctctgggggatctg

SEQ ID NO: 3952 - RNA, 23 nt, synthetic construct
  source 1..23: mol_type = other RNA
gcttctctctctgggggatctgg

SEQ ID NO: 3953 - RNA, 23 nt, synthetic construct
  source 1..23: mol_type = other RNA
cttctctctctgggggatctggg

SEQ ID NO: 3954 - RNA, 23 nt, synthetic construct
  source 1..23: mol_type = other RNA
ttctctctctgggggatctgggg

SEQ ID NO: 3955 - RNA, 23 nt, synthetic construct
  source 1..23: mol_type = other RNA
tctctctctgggggatctggggt

SEQ ID NO: 3956 - RNA, 23 nt, synthetic construct
  source 1..23: mol_type = other RNA
ctctctctgggggatctggggtc

SEQ ID NO: 3957 - RNA, 23 nt, synthetic construct
  source 1..23: mol_type = other RNA
tctctctgggggatctggggtcg

SEQ ID NO: 3958 - RNA, 23 nt, synthetic construct
  source 1..23: mol_type = other RNA
ctctctgggggatctggggtcgt

SEQ ID NO: 3959 - RNA, 23 nt, synthetic construct
  source 1..23: mol_type = other RNA
tctctgggggatctggggtcgtt

SEQ ID NO: 3960 - RNA, 23 nt, synthetic construct
  source 1..23: mol_type = other RNA
ctctgggggatctggggtcgttt

SEQ ID NO: 3961 - RNA, 23 nt, synthetic construct
  source 1..23: mol_type = other RNA
tctgggggatctggggtcgtttt

SEQ ID NO: 3962 - RNA, 23 nt, synthetic construct
  source 1..23: mol_type = other RNA
ctgggggatctggggtcgttttt

SEQ ID NO: 3963 - RNA, 23 nt, synthetic construct
  source 1..23: mol_type = other RNA
tgggggatctggggtcgtttttt

SEQ ID NO: 3964 - RNA, 23 nt, synthetic construct
  source 1..23: mol_type = other RNA
gggggatctggggtcgttttttc

SEQ ID NO: 3965 - RNA, 23 nt, synthetic construct
  source 1..23: mol_type = other RNA
ggggatctggggtcgttttttcc

SEQ ID NO: 3966 - RNA, 23 nt, synthetic construct
  source 1..23: mol_type = other RNA
gggatctggggtcgttttttcct

SEQ ID NO: 3967 - RNA, 23 nt, synthetic construct
  source 1..23: mol_type = other RNA
ggatctggggtcgttttttcctc

SEQ ID NO: 3968 - RNA, 23 nt, synthetic construct
  source 1..23: mol_type = other RNA
gatctggggtcgttttttcctca

SEQ ID NO: 3969 - RNA, 23 nt, synthetic construct
  source 1..23: mol_type = other RNA
atctggggtcgttttttcctcaa

SEQ ID NO: 3970 - RNA, 23 nt, synthetic construct
  source 1..23: mol_type = other RNA
tctggggtcgttttttcctcaaa

SEQ ID NO: 3971 - RNA, 23 nt, synthetic construct
  source 1..23: mol_type = other RNA
ctggggtcgttttttcctcaaat

SEQ ID NO: 3972 - RNA, 23 nt, synthetic construct
  source 1..23: mol_type = other RNA
tggggtcgttttttcctcaaatc

SEQ ID NO: 3973 - RNA, 23 nt, synthetic construct
  source 1..23: mol_type = other RNA
ggggtcgttttttcctcaaatca

SEQ ID NO: 3974 - RNA, 23 nt, synthetic construct
  source 1..23: mol_type = other RNA
gggtcgttttttcctcaaatcag

SEQ ID NO: 3975 - RNA, 23 nt, synthetic construct
  source 1..23: mol_type = other RNA
ggtcgttttttcctcaaatcagg

SEQ ID NO: 3976 - RNA, 23 nt, synthetic construct
  source 1..23: mol_type = other RNA
gtcgttttttcctcaaatcagga

SEQ ID NO: 3977 - RNA, 23 nt, synthetic construct
  source 1..23: mol_type = other RNA
tcgttttttcctcaaatcaggag

SEQ ID NO: 3978 - RNA, 23 nt, synthetic construct
  source 1..23: mol_type = other RNA
cgttttttcctcaaatcaggagt

SEQ ID NO: 3979 - RNA, 23 nt, synthetic construct
  source 1..23: mol_type = other RNA
gttttttcctcaaatcaggagtc

SEQ ID NO: 3980 - RNA, 23 nt, synthetic construct
  source 1..23: mol_type = other RNA
ttttttcctcaaatcaggagtct

SEQ ID NO: 3981 - RNA, 23 nt, synthetic construct
  source 1..23: mol_type = other RNA
tttttcctcaaatcaggagtctc

SEQ ID NO: 3982 - RNA, 23 nt, synthetic construct
  source 1..23: mol_type = other RNA
ttttcctcaaatcaggagtctct

SEQ ID NO: 3983 - RNA, 23 nt, synthetic construct
  source 1..23: mol_type = other RNA
tttcctcaaatcaggagtctctt

SEQ ID NO: 3984 - RNA, 23 nt, synthetic construct
  source 1..23: mol_type = other RNA
ttcctcaaatcaggagtctcttt

SEQ ID NO: 3985 - RNA, 23 nt, synthetic construct
  source 1..23: mol_type = other RNA
tcctcaaatcaggagtctctttt

SEQ ID NO: 3986 - RNA, 23 nt, synthetic construct
  source 1..23: mol_type = other RNA
cctcaaatcaggagtctcttttc

SEQ ID NO: 3987 - RNA, 23 nt, synthetic construct
  source 1..23: mol_type = other RNA
ctcaaatcaggagtctcttttcc

SEQ ID NO: 3988 - RNA, 23 nt, synthetic construct
  source 1..23: mol_type = other RNA
tcaaatcaggagtctcttttcct

SEQ ID NO: 3989 - RNA, 23 nt, synthetic construct
  source 1..23: mol_type = other RNA
caaatcaggagtctcttttcctc

SEQ ID NO: 3990 - RNA, 23 nt, synthetic construct
  source 1..23: mol_type = other RNA
aatcaggagtctcttttcctcta

SEQ ID NO: 3991 - RNA, 23 nt, synthetic construct
  source 1..23: mol_type = other RNA
atcaggagtctcttttcctctag

SEQ ID NO: 3992 - RNA, 23 nt, synthetic construct
  source 1..23: mol_type = other RNA
tcaggagtctcttttcctctaga

SEQ ID NO: 3993 - RNA, 23 nt, synthetic construct
  source 1..23: mol_type = other RNA
caggagtctcttttcctctagat

SEQ ID NO: 3994 - RNA, 23 nt, synthetic construct
  source 1..23: mol_type = other RNA
aggagtctcttttcctctagatt

SEQ ID NO: 3995 - RNA, 23 nt, synthetic construct
  source 1..23: mol_type = other RNA
ggagtctcttttcctctagattt

SEQ ID NO: 3996 - RNA, 23 nt, synthetic construct
  source 1..23: mol_type = other RNA
gagtctcttttcctctagatttt

SEQ ID NO: 3997 - RNA, 23 nt, synthetic construct
  source 1..23: mol_type = other RNA
agtctcttttcctctagattttg

SEQ ID NO: 3998 - RNA, 23 nt, synthetic construct
  source 1..23: mol_type = other RNA
gtctcttttcctctagattttgg

SEQ ID NO: 3999 - RNA, 23 nt, synthetic construct
  source 1..23: mol_type = other RNA
tctcttttcctctagattttggc

SEQ ID NO: 4000 - RNA, 23 nt, synthetic construct
  source 1..23: mol_type = other RNA
ctcttttcctctagattttggcc

SEQ ID NO: 4001 - RNA, 23 nt, synthetic construct
  source 1..23: mol_type = other RNA
tcttttcctctagattttggccc

SEQ ID NO: 4002 - RNA, 23 nt, synthetic construct
  source 1..23: mol_type = other RNA
cttttcctctagattttggccct

SEQ ID NO: 4003 - RNA, 23 nt, synthetic construct
  source 1..23: mol_type = other RNA
ttttcctctagattttggccctg

SEQ ID NO: 4004 - RNA, 23 nt, synthetic construct
  source 1..23: mol_type = other RNA
tttcctctagattttggccctgt

SEQ ID NO: 4005 - RNA, 23 nt, synthetic construct
  source 1..23: mol_type = other RNA
ttcctctagattttggccctgtg

SEQ ID NO: 4006 - RNA, 23 nt, synthetic construct
  source 1..23: mol_type = other RNA
tcctctagattttggccctgtgt

SEQ ID NO: 4007 - RNA, 23 nt, synthetic construct
  source 1..23: mol_type = other RNA
cctctagattttggccctgtgtc

SEQ ID NO: 4008 - RNA, 23 nt, synthetic construct
  source 1..23: mol_type = other RNA
ctctagattttggccctgtgtct

SEQ ID NO: 4009 - RNA, 23 nt, synthetic construct
  source 1..23: mol_type = other RNA
tctagattttggccctgtgtctc

SEQ ID NO: 4010 - RNA, 23 nt, synthetic construct
  source 1..23: mol_type = other RNA
ctagattttggccctgtgtctca

SEQ ID NO: 4011 - RNA, 23 nt, synthetic construct
  source 1..23: mol_type = other RNA
tagattttggccctgtgtctcaa

SEQ ID NO: 4012 - RNA, 23 nt, synthetic construct
  source 1..23: mol_type = other RNA
agattttggccctgtgtctcaaa

SEQ ID NO: 4013 - RNA, 23 nt, synthetic construct
  source 1..23: mol_type = other RNA
gattttggccctgtgtctcaaat

SEQ ID NO: 4014 - RNA, 23 nt, synthetic construct
  source 1..23: mol_type = other RNA
attttggccctgtgtctcaaatt

SEQ ID NO: 4015 - RNA, 23 nt, synthetic construct
  source 1..23: mol_type = other RNA
ttttggccctgtgtctcaaatta

SEQ ID NO: 4016 - RNA, 23 nt, synthetic construct
  source 1..23: mol_type = other RNA
tttggccctgtgtctcaaattac

SEQ ID NO: 4017 - RNA, 23 nt, synthetic construct
  source 1..23: mol_type = other RNA
ttggccctgtgtctcaaattacc

SEQ ID NO: 4018 - RNA, 23 nt, synthetic construct
  source 1..23: mol_type = other RNA
tggccctgtgtctcaaattaccc

SEQ ID NO: 4019 - RNA, 23 nt, synthetic construct
  source 1..23: mol_type = other RNA
ggccctgtgtctcaaattacccc

SEQ ID NO: 4020 - RNA, 23 nt, synthetic construct
  source 1..23: mol_type = other RNA
gccctgtgtctcaaattacccca

SEQ ID NO: 4021 - RNA, 23 nt, synthetic construct
  source 1..23: mol_type = other RNA
ccctgtgtctcaaattaccccac

SEQ ID NO: 4022 - RNA, 23 nt, synthetic construct
  source 1..23: mol_type = other RNA
cctgtgtctcaaattaccccaca

SEQ ID NO: 4023 - RNA, 23 nt, synthetic construct
  source 1..23: mol_type = other RNA
ctgtgtctcaaattaccccacag

SEQ ID NO: 4024 - RNA, 23 nt, synthetic construct
  source 1..23: mol_type = other RNA
tgtgtctcaaattaccccacagt

SEQ ID NO: 4025 - RNA, 23 nt, synthetic construct
  source 1..23: mol_type = other RNA
gtgtctcaaattaccccacagtg

SEQ ID NO: 4026 - RNA, 23 nt, synthetic construct
  source 1..23: mol_type = other RNA
tgtctcaaattaccccacagtgg

SEQ ID NO: 4027 - RNA, 23 nt, synthetic construct
  source 1..23: mol_type = other RNA
gtctcaaattaccccacagtggg

SEQ ID NO: 4028 - RNA, 23 nt, synthetic construct
  source 1..23: mol_type = other RNA
tctcaaattaccccacagtgggg

SEQ ID NO: 4029 - RNA, 23 nt, synthetic construct
  source 1..23: mol_type = other RNA
ctcaaattaccccacagtggggg

SEQ ID NO: 4030 - RNA, 23 nt, synthetic construct
  source 1..23: mol_type = other RNA
tcaaattaccccacagtgggggg

SEQ ID NO: 4031 - RNA, 23 nt, synthetic construct
  source 1..23: mol_type = other RNA
caaattaccccacagtggggggt

SEQ ID NO: 4032 - RNA, 23 nt, synthetic construct
  source 1..23: mol_type = other RNA
aaattaccccacagtggggggtg

SEQ ID NO: 4033 - RNA, 23 nt, synthetic construct
  source 1..23: mol_type = other RNA
aattaccccacagtggggggtgg

SEQ ID NO: 4034 - RNA, 23 nt, synthetic construct
  source 1..23: mol_type = other RNA
attaccccacagtggggggtggt

SEQ ID NO: 4035 - RNA, 23 nt, synthetic construct
  source 1..23: mol_type = other RNA
ttaccccacagtggggggtggtg

SEQ ID NO: 4036 - RNA, 23 nt, synthetic construct
  source 1..23: mol_type = other RNA
taccccacagtggggggtggtga

SEQ ID NO: 4037 - RNA, 23 nt, synthetic construct
  source 1..23: mol_type = other RNA
accccacagtggggggtggtgaa

SEQ ID NO: 4038 - RNA, 23 nt, synthetic construct
  source 1..23: mol_type = other RNA
ccccacagtggggggtggtgaag

SEQ ID NO: 4039 - RNA, 23 nt, synthetic construct
  source 1..23: mol_type = other RNA
cccacagtggggggtggtgaagt

SEQ ID NO: 4040 - RNA, 23 nt, synthetic construct
  source 1..23: mol_type = other RNA
ccacagtggggggtggtgaagta

SEQ ID NO: 4041 - RNA, 23 nt, synthetic construct
  source 1..23: mol_type = other RNA
cacagtggggggtggtgaagtat

SEQ ID NO: 4042 - RNA, 23 nt, synthetic construct
  source 1..23: mol_type = other RNA
acagtggggggtggtgaagtatc

SEQ ID NO: 4043 - RNA, 23 nt, synthetic construct
  source 1..23: mol_type = other RNA
cagtggggggtggtgaagtatct

SEQ ID NO: 4044 - RNA, 23 nt, synthetic construct
  source 1..23: mol_type = other RNA
agtggggggtggtgaagtatctt

SEQ ID NO: 4045 - RNA, 23 nt, synthetic construct
  source 1..23: mol_type = other RNA
gtggggggtggtgaagtatcttt

SEQ ID NO: 4046 - RNA, 23 nt, synthetic construct
  source 1..23: mol_type = other RNA
tggggggtggtgaagtatctttc

SEQ ID NO: 4047 - RNA, 23 nt, synthetic construct
  source 1..23: mol_type = other RNA
ggggggtggtgaagtatctttct

SEQ ID NO: 4048 - RNA, 23 nt, synthetic construct
  source 1..23: mol_type = other RNA
gggggtggtgaagtatctttctc

SEQ ID NO: 4049 - RNA, 23 nt, synthetic construct
  source 1..23: mol_type = other RNA
ggggtggtgaagtatctttctct

SEQ ID NO: 4050 - RNA, 23 nt, synthetic construct
  source 1..23: mol_type = other RNA
gggtggtgaagtatctttctctg

SEQ ID NO: 4051 - RNA, 23 nt, synthetic construct
  source 1..23: mol_type = other RNA
ggtggtgaagtatctttctctgt

SEQ ID NO: 4052 - RNA, 23 nt, synthetic construct
  source 1..23: mol_type = other RNA
gtggtgaagtatctttctctgtg

SEQ ID NO: 4053 - RNA, 23 nt, synthetic construct
  source 1..23: mol_type = other RNA
tggtgaagtatctttctctgtgg

SEQ ID NO: 4054 - RNA, 23 nt, synthetic construct
  source 1..23: mol_type = other RNA
ggtgaagtatctttctctgtggg

SEQ ID NO: 4055 - RNA, 23 nt, synthetic construct
  source 1..23: mol_type = other RNA
gtgaagtatctttctctgtgggt

SEQ ID NO: 4056 - RNA, 23 nt, synthetic construct
  source 1..23: mol_type = other RNA
tgaagtatctttctctgtgggtc

SEQ ID NO: 4057 - RNA, 23 nt, synthetic construct
  source 1..23: mol_type = other RNA
gaagtatctttctctgtgggtct

SEQ ID NO: 4058 - RNA, 23 nt, synthetic construct
  source 1..23: mol_type = other RNA
aagtatctttctctgtgggtcta

SEQ ID NO: 4059 - RNA, 23 nt, synthetic construct
  source 1..23: mol_type = other RNA
agtatctttctctgtgggtctag

SEQ ID NO: 4060 - RNA, 23 nt, synthetic construct
  source 1..23: mol_type = other RNA
gtatctttctctgtgggtctagg

SEQ ID NO: 4061 - RNA, 23 nt, synthetic construct
  source 1..23: mol_type = other RNA
tatctttctctgtgggtctaggg

SEQ ID NO: 4062 - RNA, 23 nt, synthetic construct
  source 1..23: mol_type = other RNA
atctttctctgtgggtctagggt

SEQ ID NO: 4063 - RNA, 23 nt, synthetic construct
  source 1..23: mol_type = other RNA
tctttctctgtgggtctagggtc

SEQ ID NO: 4064 - RNA, 23 nt, synthetic construct
  source 1..23: mol_type = other RNA
ctttctctgtgggtctagggtct

SEQ ID NO: 4065 - RNA, 23 nt, synthetic construct
  source 1..23: mol_type = other RNA
tttctctgtgggtctagggtctc

SEQ ID NO: 4066 - RNA, 23 nt, synthetic construct
  source 1..23: mol_type = other RNA
ttctctgtgggtctagggtctct

SEQ ID NO: 4067 - RNA, 23 nt, synthetic construct
  source 1..23: mol_type = other RNA
tctctgtgggtctagggtctctc

SEQ ID NO: 4068 - RNA, 23 nt, synthetic construct
  source 1..23: mol_type = other RNA
ctctgtgggtctagggtctctct

SEQ ID NO: 4069 - RNA, 23 nt, synthetic construct
  source 1..23: mol_type = other RNA
tctgtgggtctagggtctctctg

SEQ ID NO: 4070 - RNA, 23 nt, synthetic construct
  source 1..23: mol_type = other RNA
ctgtgggtctagggtctctctgt

SEQ ID NO: 4071 - RNA, 23 nt, synthetic construct
  source 1..23: mol_type = other RNA
tgtgggtctagggtctctctgtc

SEQ ID NO: 4072 - RNA, 23 nt, synthetic construct
  source 1..23: mol_type = other RNA
gtgggtctagggtctctctgtct

SEQ ID NO: 4073 - RNA, 23 nt, synthetic construct
  source 1..23: mol_type = other RNA
tgggtctagggtctctctgtctc

SEQ ID NO: 4074 - RNA, 23 nt, synthetic construct
  source 1..23: mol_type = other RNA
gggtctagggtctctctgtctca

SEQ ID NO: 4075 - RNA, 23 nt, synthetic construct
  source 1..23: mol_type = other RNA
ggtctagggtctctctgtctcag

SEQ ID NO: 4076 - RNA, 23 nt, synthetic construct
  source 1..23: mol_type = other RNA
gtctagggtctctctgtctcagg

SEQ ID NO: 4077 - RNA, 23 nt, synthetic construct
  source 1..23: mol_type = other RNA
tctagggtctctctgtctcaggg

SEQ ID NO: 4078 - RNA, 23 nt, synthetic construct
  source 1..23: mol_type = other RNA
ctagggtctctctgtctcagggt

SEQ ID NO: 4079 - RNA, 23 nt, synthetic construct
  source 1..23: mol_type = other RNA
tagggtctctctgtctcagggtc

SEQ ID NO: 4080 - RNA, 23 nt, synthetic construct
  source 1..23: mol_type = other RNA
agggtctctctgtctcagggtct

SEQ ID NO: 4081 - RNA, 23 nt, synthetic construct
  source 1..23: mol_type = other RNA
gggtctctctgtctcagggtctg

SEQ ID NO: 4082 - RNA, 23 nt, synthetic construct
  source 1..23: mol_type = other RNA
ggtctctctgtctcagggtctgg

SEQ ID NO: 4083 - RNA, 23 nt, synthetic construct
  source 1..23: mol_type = other RNA
gtctctctgtctcagggtctggg

SEQ ID NO: 4084 - RNA, 23 nt, synthetic construct
  source 1..23: mol_type = other RNA
tctctctgtctcagggtctgggg

SEQ ID NO: 4085 - RNA, 23 nt, synthetic construct
  source 1..23: mol_type = other RNA
ctctctgtctcagggtctggggt

SEQ ID NO: 4086 - RNA, 23 nt, synthetic construct
  source 1..23: mol_type = other RNA
tctctgtctcagggtctggggtc

SEQ ID NO: 4087 - RNA, 23 nt, synthetic construct
  source 1..23: mol_type = other RNA
ctctgtctcagggtctggggtct

SEQ ID NO: 4088 - RNA, 23 nt, synthetic construct
  source 1..23: mol_type = other RNA
tctgtctcagggtctggggtctg

SEQ ID NO: 4089 - RNA, 23 nt, synthetic construct
  source 1..23: mol_type = other RNA
ctgtctcagggtctggggtctgc

SEQ ID NO: 4090 - RNA, 23 nt, synthetic construct
  source 1..23: mol_type = other RNA
tgtctcagggtctggggtctgca

SEQ ID NO: 4091 - RNA, 23 nt, synthetic construct
  source 1..23: mol_type = other RNA
gtctcagggtctggggtctgcat

SEQ ID NO: 4092 - RNA, 23 nt, synthetic construct
  source 1..23: mol_type = other RNA
tctcagggtctggggtctgcatc

SEQ ID NO: 4093 - RNA, 23 nt, synthetic construct
  source 1..23: mol_type = other RNA
ctcagggtctggggtctgcatct

SEQ ID NO: 4094 - RNA, 23 nt, synthetic construct
  source 1..23: mol_type = other RNA
tcagggtctggggtctgcatctt

SEQ ID NO: 4095 - RNA, 23 nt, synthetic construct
  source 1..23: mol_type = other RNA
cagggtctggggtctgcatcttt

SEQ ID NO: 4096 - RNA, 23 nt, synthetic construct
  source 1..23: mol_type = other RNA
agggtctggggtctgcatcttta

SEQ ID NO: 4097 - RNA, 23 nt, synthetic construct
  source 1..23: mol_type = other RNA
gggtctggggtctgcatctttag

SEQ ID NO: 4098 - RNA, 23 nt, synthetic construct
  source 1..23: mol_type = other RNA
ggtctggggtctgcatctttagg

SEQ ID NO: 4099 - RNA, 23 nt, synthetic construct
  source 1..23: mol_type = other RNA
gtctggggtctgcatctttagga

SEQ ID NO: 4100 - RNA, 23 nt, synthetic construct
  source 1..23: mol_type = other RNA
tctggggtctgcatctttaggac

SEQ ID NO: 4101 - RNA, 23 nt, synthetic construct
  source 1..23: mol_type = other RNA
ctggggtctgcatctttaggacc

SEQ ID NO: 4102 - RNA, 23 nt, synthetic construct
  source 1..23: mol_type = other RNA
tggggtctgcatctttaggacct

SEQ ID NO: 4103 - RNA, 23 nt, synthetic construct
  source 1..23: mol_type = other RNA
ggggtctgcatctttaggacctc

SEQ ID NO: 4104 - RNA, 23 nt, synthetic construct
  source 1..23: mol_type = other RNA
gggtctgcatctttaggacctct

SEQ ID NO: 4105 - RNA, 23 nt, synthetic construct
  source 1..23: mol_type = other RNA
ggtctgcatctttaggacctctg

SEQ ID NO: 4106 - RNA, 23 nt, synthetic construct
  source 1..23: mol_type = other RNA
gtctgcatctttaggacctctgt

SEQ ID NO: 4107 - RNA, 23 nt, synthetic construct
  source 1..23: mol_type = other RNA
tctgcatctttaggacctctgtc

SEQ ID NO: 4108 - RNA, 23 nt, synthetic construct
  source 1..23: mol_type = other RNA
ctgcatctttaggacctctgtct

SEQ ID NO: 4109 - RNA, 23 nt, synthetic construct
  source 1..23: mol_type = other RNA
tgcatctttaggacctctgtctc

SEQ ID NO: 4110 - RNA, 23 nt, synthetic construct
  source 1..23: mol_type = other RNA
gcatctttaggacctctgtctct

SEQ ID NO: 4111 - RNA, 23 nt, synthetic construct
  source 1..23: mol_type = other RNA
catctttaggacctctgtctctc

SEQ ID NO: 4112 - RNA, 23 nt, synthetic construct
  source 1..23: mol_type = other RNA
atctttaggacctctgtctctct

SEQ ID NO: 4113 - RNA, 23 nt, synthetic construct
  source 1..23: mol_type = other RNA
tctttaggacctctgtctctctc

SEQ ID NO: 4114 - RNA, 23 nt, synthetic construct
  source 1..23: mol_type = other RNA
ctttaggacctctgtctctctct

SEQ ID NO: 4115 - RNA, 23 nt, synthetic construct
  source 1..23: mol_type = other RNA
tttaggacctctgtctctctctg

SEQ ID NO: 4116 - RNA, 23 nt, synthetic construct
  source 1..23: mol_type = other RNA
ttaggacctctgtctctctctgg

SEQ ID NO: 4117 - RNA, 23 nt, synthetic construct
  source 1..23: mol_type = other RNA
taggacctctgtctctctctggt

SEQ ID NO: 4118 - RNA, 23 nt, synthetic construct
  source 1..23: mol_type = other RNA
aggacctctgtctctctctggtg

SEQ ID NO: 4119 - RNA, 23 nt, synthetic construct
  source 1..23: mol_type = other RNA
ggacctctgtctctctctggtgt

SEQ ID NO: 4120 - RNA, 23 nt, synthetic construct
  source 1..23: mol_type = other RNA
gacctctgtctctctctggtgtg

SEQ ID NO: 4121 - RNA, 23 nt, synthetic construct
  source 1..23: mol_type = other RNA
acctctgtctctctctggtgtgt

SEQ ID NO: 4122 - RNA, 23 nt, synthetic construct
  source 1..23: mol_type = other RNA
cctctgtctctctctggtgtgtt

SEQ ID NO: 4123 - RNA, 23 nt, synthetic construct
  source 1..23: mol_type = other RNA
ctctgtctctctctggtgtgttt

SEQ ID NO: 4124 - RNA, 24 nt, synthetic construct
  source 1..24: mol_type = other RNA
gggtctggagtctaagatatctgt

SEQ ID NO: 4125 - RNA, 24 nt, synthetic construct
  source 1..24: mol_type = other RNA
ggtctggagtctaagatatctgta

SEQ ID NO: 4126 - RNA, 24 nt, synthetic construct
  source 1..24: mol_type = other RNA
gtctggagtctaagatatctgtag

SEQ ID NO: 4127 - RNA, 24 nt, synthetic construct
  source 1..24: mol_type = other RNA
tctggagtctaagatatctgtagg

SEQ ID NO: 4128 - RNA, 24 nt, synthetic construct
  source 1..24: mol_type = other RNA
ctggagtctaagatatctgtaggt

SEQ ID NO: 4129 - RNA, 24 nt, synthetic construct
  source 1..24: mol_type = other RNA
tggagtctaagatatctgtaggta

SEQ ID NO: 4130 - RNA, 24 nt, synthetic construct
  source 1..24: mol_type = other RNA
ggagtctaagatatctgtaggtat

SEQ ID NO: 4131 - RNA, 24 nt, synthetic construct
  source 1..24: mol_type = other RNA
gagtctaagatatctgtaggtatg

SEQ ID NO: 4132 - RNA, 24 nt, synthetic construct
  source 1..24: mol_type = other RNA
agtctaagatatctgtaggtatgg

SEQ ID NO: 4133 - RNA, 24 nt, synthetic construct
  source 1..24: mol_type = other RNA
gtctaagatatctgtaggtatgga

SEQ ID NO: 4134 - RNA, 24 nt, synthetic construct
  source 1..24: mol_type = other RNA
tctaagatatctgtaggtatggag

SEQ ID NO: 4135 - RNA, 24 nt, synthetic construct
  source 1..24: mol_type = other RNA
ctaagatatctgtaggtatggaga

SEQ ID NO: 4136 - RNA, 24 nt, synthetic construct
  source 1..24: mol_type = other RNA
taagatatctgtaggtatggagaa

SEQ ID NO: 4137 - RNA, 24 nt, synthetic construct
  source 1..24: mol_type = other RNA
aagatatctgtaggtatggagaac

SEQ ID NO: 4138 - RNA, 24 nt, synthetic construct
  source 1..24: mol_type = other RNA
agatatctgtaggtatggagaacc

SEQ ID NO: 4139 - RNA, 24 nt, synthetic construct
  source 1..24: mol_type = other RNA
gatatctgtaggtatggagaaccc

SEQ ID NO: 4140 - RNA, 24 nt, synthetic construct
  source 1..24: mol_type = other RNA
atatctgtaggtatggagaaccct

SEQ ID NO: 4141 - RNA, 24 nt, synthetic construct
  source 1..24: mol_type = other RNA
tatctgtaggtatggagaaccctt

SEQ ID NO: 4142 - RNA, 24 nt, synthetic construct
  source 1..24: mol_type = other RNA
atctgtaggtatggagaacccttt

SEQ ID NO: 4143 - RNA, 24 nt, synthetic construct
  source 1..24: mol_type = other RNA
tctgtaggtatggagaaccctttt

SEQ ID NO: 4144 - RNA, 24 nt, synthetic construct
  source 1..24: mol_type = other RNA
ctgtaggtatggagaacccttttt

SEQ ID NO: 4145 - RNA, 24 nt, synthetic construct
  source 1..24: mol_type = other RNA
tgtaggtatggagaacccttttta

SEQ ID NO: 4146 - RNA, 24 nt, synthetic construct
  source 1..24: mol_type = other RNA
gtaggtatggagaaccctttttag

SEQ ID NO: 4147 - RNA, 24 nt, synthetic construct
  source 1..24: mol_type = other RNA
taggtatggagaaccctttttaga

SEQ ID NO: 4148 - RNA, 24 nt, synthetic construct
  source 1..24: mol_type = other RNA
aggtatggagaaccctttttagac

SEQ ID NO: 4149 - RNA, 24 nt, synthetic construct
  source 1..24: mol_type = other RNA
ggtatggagaaccctttttagact

SEQ ID NO: 4150 - RNA, 24 nt, synthetic construct
  source 1..24: mol_type = other RNA
gtatggagaaccctttttagactg

SEQ ID NO: 4151 - RNA, 24 nt, synthetic construct
  source 1..24: mol_type = other RNA
tatggagaaccctttttagactgg

SEQ ID NO: 4152 - RNA, 24 nt, synthetic construct
  source 1..24: mol_type = other RNA
atggagaaccctttttagactgga

SEQ ID NO: 4153 - RNA, 24 nt, synthetic construct
  source 1..24: mol_type = other RNA
tggagaaccctttttagactggat

SEQ ID NO: 4154 - RNA, 24 nt, synthetic construct
  source 1..24: mol_type = other RNA
ggagaaccctttttagactggatt

SEQ ID NO: 4155 - RNA, 24 nt, synthetic construct
  source 1..24: mol_type = other RNA
gagaaccctttttagactggattt

SEQ ID NO: 4156 - RNA, 24 nt, synthetic construct
  source 1..24: mol_type = other RNA
agaaccctttttagactggatttt

SEQ ID NO: 4157 - RNA, 24 nt, synthetic construct
  source 1..24: mol_type = other RNA
gaaccctttttagactggattttc

SEQ ID NO: 4158 - RNA, 24 nt, synthetic construct
  source 1..24: mol_type = other RNA
aaccctttttagactggattttca

SEQ ID NO: 4159 - RNA, 24 nt, synthetic construct
  source 1..24: mol_type = other RNA
accctttttagactggattttcag

SEQ ID NO: 4160 - RNA, 24 nt, synthetic construct
  source 1..24: mol_type = other RNA
ccctttttagactggattttcaga

SEQ ID NO: 4161 - RNA, 24 nt, synthetic construct
  source 1..24: mol_type = other RNA
cctttttagactggattttcagat

SEQ ID NO: 4162 - RNA, 24 nt, synthetic construct
  source 1..24: mol_type = other RNA
ctttttagactggattttcagatt

SEQ ID NO: 4163 - RNA, 24 nt, synthetic construct
  source 1..24: mol_type = other RNA
tttttagactggattttcagattt

SEQ ID NO: 4164 - RNA, 24 nt, synthetic construct
  source 1..24: mol_type = other RNA
ttttagactggattttcagatttt

SEQ ID NO: 4165 - RNA, 24 nt, synthetic construct
  source 1..24: mol_type = other RNA
tttagactggattttcagattttg

SEQ ID NO: 4166 - RNA, 24 nt, synthetic construct
  source 1..24: mol_type = other RNA
ttagactggattttcagattttga

SEQ ID NO: 4167 - RNA, 24 nt, synthetic construct
  source 1..24: mol_type = other RNA
tagactggattttcagattttgat

SEQ ID NO: 4168 - RNA, 24 nt, synthetic construct
  source 1..24: mol_type = other RNA
agactggattttcagattttgata

SEQ ID NO: 4169 - RNA, 24 nt, synthetic construct
  source 1..24: mol_type = other RNA
gactggattttcagattttgatat

SEQ ID NO: 4170 - RNA, 24 nt, synthetic construct
  source 1..24: mol_type = other RNA
actggattttcagattttgatatt

SEQ ID NO: 4171 - RNA, 24 nt, synthetic construct
  source 1..24: mol_type = other RNA
ctggattttcagattttgatattg

SEQ ID NO: 4172 - RNA, 24 nt, synthetic construct
  source 1..24: mol_type = other RNA
tggattttcagattttgatattga

SEQ ID NO: 4173 - RNA, 24 nt, synthetic construct
  source 1..24: mol_type = other RNA
ggattttcagattttgatattgag

SEQ ID NO: 4174 - RNA, 24 nt, synthetic construct
  source 1..24: mol_type = other RNA
gattttcagattttgatattgagc

SEQ ID NO: 4175 - RNA, 24 nt, synthetic construct
  source 1..24: mol_type = other RNA
attttcagattttgatattgagct

SEQ ID NO: 4176 - RNA, 24 nt, synthetic construct
  source 1..24: mol_type = other RNA
ttttcagattttgatattgagctt

SEQ ID NO: 4177 - RNA, 24 nt, synthetic construct
  source 1..24: mol_type = other RNA
tttcagattttgatattgagcttc

SEQ ID NO: 4178 - RNA, 24 nt, synthetic construct
  source 1..24: mol_type = other RNA
ttcagattttgatattgagcttct

SEQ ID NO: 4179 - RNA, 24 nt, synthetic construct
  source 1..24: mol_type = other RNA
tcagattttgatattgagcttctc

SEQ ID NO: 4180 - RNA, 24 nt, synthetic construct
  source 1..24: mol_type = other RNA
cagattttgatattgagcttctct

SEQ ID NO: 4181 - RNA, 24 nt, synthetic construct
  source 1..24: mol_type = other RNA
agattttgatattgagcttctctc

SEQ ID NO: 4182 - RNA, 24 nt, synthetic construct
  source 1..24: mol_type = other RNA
gattttgatattgagcttctctct

SEQ ID NO: 4183 - RNA, 24 nt, synthetic construct
  source 1..24: mol_type = other RNA
attttgatattgagcttctctctc

SEQ ID NO: 4184 - RNA, 24 nt, synthetic construct
  source 1..24: mol_type = other RNA
ttttgatattgagcttctctctct

SEQ ID NO: 4185 - RNA, 24 nt, synthetic construct
  source 1..24: mol_type = other RNA
tttgatattgagcttctctctctg

SEQ ID NO: 4186 - RNA, 24 nt, synthetic construct
  source 1..24: mol_type = other RNA
ttgatattgagcttctctctctgg

SEQ ID NO: 4187 - RNA, 24 nt, synthetic construct
  source 1..24: mol_type = other RNA
tgatattgagcttctctctctggg

SEQ ID NO: 4188 - RNA, 24 nt, synthetic construct
  source 1..24: mol_type = other RNA
gatattgagcttctctctctgggg

SEQ ID NO: 4189 - RNA, 24 nt, synthetic construct
  source 1..24: mol_type = other RNA
atattgagcttctctctctggggg

SEQ ID NO: 4190 - RNA, 24 nt, synthetic construct
  source 1..24: mol_type = other RNA
tattgagcttctctctctggggga

SEQ ID NO: 4191 - RNA, 24 nt, synthetic construct
  source 1..24: mol_type = other RNA
attgagcttctctctctgggggat

SEQ ID NO: 4192 - RNA, 24 nt, synthetic construct
  source 1..24: mol_type = other RNA
ttgagcttctctctctgggggatc

SEQ ID NO: 4193 - RNA, 24 nt, synthetic construct
  source 1..24: mol_type = other RNA
tgagcttctctctctgggggatct

SEQ ID NO: 4194 - RNA, 24 nt, synthetic construct
  source 1..24: mol_type = other RNA
gagcttctctctctgggggatctg

SEQ ID NO: 4195 - RNA, 24 nt, synthetic construct
  source 1..24: mol_type = other RNA
agcttctctctctgggggatctgg

SEQ ID NO: 4196 - RNA, 24 nt, synthetic construct
  source 1..24: mol_type = other RNA
gcttctctctctgggggatctggg

SEQ ID NO: 4197 - RNA, 24 nt, synthetic construct
  source 1..24: mol_type = other RNA
cttctctctctgggggatctgggg

SEQ ID NO: 4198 - RNA, 24 nt, synthetic construct
  source 1..24: mol_type = other RNA
ttctctctctgggggatctggggt

SEQ ID NO: 4199 - RNA, 24 nt, synthetic construct
  source 1..24: mol_type = other RNA
tctctctctgggggatctggggtc

SEQ ID NO: 4200 - RNA, 24 nt, synthetic construct
  source 1..24: mol_type = other RNA
ctctctctgggggatctggggtcg

SEQ ID NO: 4201 - RNA, 24 nt, synthetic construct
  source 1..24: mol_type = other RNA
tctctctgggggatctggggtcgt

SEQ ID NO: 4202 - RNA, 24 nt, synthetic construct
  source 1..24: mol_type = other RNA
ctctctgggggatctggggtcgtt

SEQ ID NO: 4203 - RNA, 24 nt, synthetic construct
  source 1..24: mol_type = other RNA
tctctgggggatctggggtcgttt

SEQ ID NO: 4204 - RNA, 24 nt, synthetic construct
  source 1..24: mol_type = other RNA
ctctgggggatctggggtcgtttt

SEQ ID NO: 4205 - RNA, 24 nt, synthetic construct
  source 1..24: mol_type = other RNA
tctgggggatctggggtcgttttt

SEQ ID NO: 4206 - RNA, 24 nt, synthetic construct
  source 1..24: mol_type = other RNA
ctgggggatctggggtcgtttttt

SEQ ID NO: 4207 - RNA, 24 nt, synthetic construct
  source 1..24: mol_type = other RNA
tgggggatctggggtcgttttttc

SEQ ID NO: 4208 - RNA, 24 nt, synthetic construct
  source 1..24: mol_type = other RNA
gggggatctggggtcgttttttcc

SEQ ID NO: 4209 - RNA, 24 nt, synthetic construct
  source 1..24: mol_type = other RNA
ggggatctggggtcgttttttcct

SEQ ID NO: 4210 - RNA, 24 nt, synthetic construct
  source 1..24: mol_type = other RNA
gggatctggggtcgttttttcctc

SEQ ID NO: 4211 - RNA, 24 nt, synthetic construct
  source 1..24: mol_type = other RNA
ggatctggggtcgttttttcctca

SEQ ID NO: 4212 - RNA, 24 nt, synthetic construct
  source 1..24: mol_type = other RNA
gatctggggtcgttttttcctcaa

SEQ ID NO: 4213 - RNA, 24 nt, synthetic construct
  source 1..24: mol_type = other RNA
atctggggtcgttttttcctcaaa

SEQ ID NO: 4214 - RNA, 24 nt, synthetic construct
  source 1..24: mol_type = other RNA
tctggggtcgttttttcctcaaat

SEQ ID NO: 4215 - RNA, 24 nt, synthetic construct
  source 1..24: mol_type = other RNA
ctggggtcgttttttcctcaaatc

SEQ ID NO: 4216 - RNA, 24 nt, synthetic construct
  source 1..24: mol_type = other RNA
tggggtcgttttttcctcaaatca

SEQ ID NO: 4217 - RNA, 24 nt, synthetic construct
  source 1..24: mol_type = other RNA
ggggtcgttttttcctcaaatcag

SEQ ID NO: 4218 - RNA, 24 nt, synthetic construct
  source 1..24: mol_type = other RNA
gggtcgttttttcctcaaatcagg

SEQ ID NO: 4219 - RNA, 24 nt, synthetic construct
  source 1..24: mol_type = other RNA
ggtcgttttttcctcaaatcagga

SEQ ID NO: 4220 - RNA, 24 nt, synthetic construct
  source 1..24: mol_type = other RNA
gtcgttttttcctcaaatcaggag

SEQ ID NO: 4221 - RNA, 24 nt, synthetic construct
  source 1..24: mol_type = other RNA
tcgttttttcctcaaatcaggagt

SEQ ID NO: 4222 - RNA, 24 nt, synthetic construct
  source 1..24: mol_type = other RNA
cgttttttcctcaaatcaggagtc

SEQ ID NO: 4223 - RNA, 24 nt, synthetic construct
  source 1..24: mol_type = other RNA
gttttttcctcaaatcaggagtct

SEQ ID NO: 4224 - RNA, 24 nt, synthetic construct
  source 1..24: mol_type = other RNA
ttttttcctcaaatcaggagtctc

SEQ ID NO: 4225 - RNA, 24 nt, synthetic construct
  source 1..24: mol_type = other RNA
tttttcctcaaatcaggagtctct

SEQ ID NO: 4226 - RNA, 24 nt, synthetic construct
  source 1..24: mol_type = other RNA
ttttcctcaaatcaggagtctctt

SEQ ID NO: 4227 - RNA, 24 nt, synthetic construct
  source 1..24: mol_type = other RNA
tttcctcaaatcaggagtctcttt

SEQ ID NO: 4228 - RNA, 24 nt, synthetic construct
  source 1..24: mol_type = other RNA
ttcctcaaatcaggagtctctttt

SEQ ID NO: 4229 - RNA, 24 nt, synthetic construct
  source 1..24: mol_type = other RNA
tcctcaaatcaggagtctcttttc

SEQ ID NO: 4230 - RNA, 24 nt, synthetic construct
  source 1..24: mol_type = other RNA
cctcaaatcaggagtctcttttcc

SEQ ID NO: 4231 - RNA, 24 nt, synthetic construct
  source 1..24: mol_type = other RNA
ctcaaatcaggagtctcttttcct

SEQ ID NO: 4232 - RNA, 24 nt, synthetic construct
  source 1..24: mol_type = other RNA
tcaaatcaggagtctcttttcctc

SEQ ID NO: 4233 - RNA, 24 nt, synthetic construct
  source 1..24: mol_type = other RNA
caaatcaggagtctcttttcctct

SEQ ID NO: 4234 - RNA, 24 nt, synthetic construct
  source 1..24: mol_type = other RNA
aaatcaggagtctcttttcctcta

SEQ ID NO: 4235 - RNA, 24 nt, synthetic construct
  source 1..24: mol_type = other RNA
aatcaggagtctcttttcctctag

SEQ ID NO: 4236 - RNA, 24 nt, synthetic construct
  source 1..24: mol_type = other RNA
atcaggagtctcttttcctctaga

SEQ ID NO: 4237 - RNA, 24 nt, synthetic construct
  source 1..24: mol_type = other RNA
tcaggagtctcttttcctctagat

SEQ ID NO: 4238 - RNA, 24 nt, synthetic construct
  source 1..24: mol_type = other RNA
caggagtctcttttcctctagatt

SEQ ID NO: 4239 - RNA, 24 nt, synthetic construct
  source 1..24: mol_type = other RNA
aggagtctcttttcctctagattt

SEQ ID NO: 4240 - RNA, 24 nt, synthetic construct
  source 1..24: mol_type = other RNA
ggagtctcttttcctctagatttt

SEQ ID NO: 4241 - RNA, 24 nt, synthetic construct
  source 1..24: mol_type = other RNA
gagtctcttttcctctagattttg

SEQ ID NO: 4242 - RNA, 24 nt, synthetic construct
  source 1..24: mol_type = other RNA
agtctcttttcctctagattttgg

SEQ ID NO: 4243 - RNA, 24 nt, synthetic construct
  source 1..24: mol_type = other RNA
gtctcttttcctctagattttggc

SEQ ID NO: 4244 - RNA, 24 nt, synthetic construct
  source 1..24: mol_type = other RNA
tctcttttcctctagattttggcc

SEQ ID NO: 4245 - RNA, 24 nt, synthetic construct
  source 1..24: mol_type = other RNA
ctcttttcctctagattttggccc

SEQ ID NO: 4246 - RNA, 24 nt, synthetic construct
  source 1..24: mol_type = other RNA
tcttttcctctagattttggccct

SEQ ID NO: 4247 - RNA, 24 nt, synthetic construct
  source 1..24: mol_type = other RNA
cttttcctctagattttggccctg

SEQ ID NO: 4248 - RNA, 24 nt, synthetic construct
  source 1..24: mol_type = other RNA
ttttcctctagattttggccctgt

SEQ ID NO: 4249 - RNA, 24 nt, synthetic construct
  source 1..24: mol_type = other RNA
tttcctctagattttggccctgtg

SEQ ID NO: 4250 - RNA, 24 nt, synthetic construct
  source 1..24: mol_type = other RNA
ttcctctagattttggccctgtgt

SEQ ID NO: 4251 - RNA, 24 nt, synthetic construct
  source 1..24: mol_type = other RNA
tcctctagattttggccctgtgtc

SEQ ID NO: 4252 - RNA, 24 nt, synthetic construct
  source 1..24: mol_type = other RNA
cctctagattttggccctgtgtct

SEQ ID NO: 4253 - RNA, 24 nt, synthetic construct
  source 1..24: mol_type = other RNA
ctctagattttggccctgtgtctc

SEQ ID NO: 4254 - RNA, 24 nt, synthetic construct
  source 1..24: mol_type = other RNA
tctagattttggccctgtgtctca

SEQ ID NO: 4255 - RNA, 24 nt, synthetic construct
  source 1..24: mol_type = other RNA
ctagattttggccctgtgtctcaa

SEQ ID NO: 4256 - RNA, 24 nt, synthetic construct
  source 1..24: mol_type = other RNA
tagattttggccctgtgtctcaaa

SEQ ID NO: 4257 - RNA, 24 nt, synthetic construct
  source 1..24: mol_type = other RNA
agattttggccctgtgtctcaaat

SEQ ID NO: 4258 - RNA, 24 nt, synthetic construct
  source 1..24: mol_type = other RNA
gattttggccctgtgtctcaaatt

SEQ ID NO: 4259 - RNA, 24 nt, synthetic construct
  source 1..24: mol_type = other RNA
attttggccctgtgtctcaaatta

SEQ ID NO: 4260 - RNA, 24 nt, synthetic construct
  source 1..24: mol_type = other RNA
ttttggccctgtgtctcaaattac

SEQ ID NO: 4261 - RNA, 24 nt, synthetic construct
  source 1..24: mol_type = other RNA
tttggccctgtgtctcaaattacc

SEQ ID NO: 4262 - RNA, 24 nt, synthetic construct
  source 1..24: mol_type = other RNA
ttggccctgtgtctcaaattaccc

SEQ ID NO: 4263 - RNA, 24 nt, synthetic construct
  source 1..24: mol_type = other RNA
tggccctgtgtctcaaattacccc

SEQ ID NO: 4264 - RNA, 24 nt, synthetic construct
  source 1..24: mol_type = other RNA
ggccctgtgtctcaaattacccca

SEQ ID NO: 4265 - RNA, 24 nt, synthetic construct
  source 1..24: mol_type = other RNA
gccctgtgtctcaaattaccccac

SEQ ID NO: 4266 - RNA, 24 nt, synthetic construct
  source 1..24: mol_type = other RNA
ccctgtgtctcaaattaccccaca

SEQ ID NO: 4267 - RNA, 24 nt, synthetic construct
  source 1..24: mol_type = other RNA
cctgtgtctcaaattaccccacag

SEQ ID NO: 4268 - RNA, 24 nt, synthetic construct
  source 1..24: mol_type = other RNA
ctgtgtctcaaattaccccacagt

SEQ ID NO: 4269 - RNA, 24 nt, synthetic construct
  source 1..24: mol_type = other RNA
tgtgtctcaaattaccccacagtg

SEQ ID NO: 4270 - RNA, 24 nt, synthetic construct
  source 1..24: mol_type = other RNA
gtgtctcaaattaccccacagtgg

SEQ ID NO: 4271 - RNA, 24 nt, synthetic construct
  source 1..24: mol_type = other RNA
tgtctcaaattaccccacagtggg

SEQ ID NO: 4272 - RNA, 24 nt, synthetic construct
  source 1..24: mol_type = other RNA
gtctcaaattaccccacagtgggg

SEQ ID NO: 4273 - RNA, 24 nt, synthetic construct
  source 1..24: mol_type = other RNA
tctcaaattaccccacagtggggg

SEQ ID NO: 4274 - RNA, 24 nt, synthetic construct
  source 1..24: mol_type = other RNA
ctcaaattaccccacagtgggggg

SEQ ID NO: 4275 - RNA, 24 nt, synthetic construct
  source 1..24: mol_type = other RNA
tcaaattaccccacagtggggggt

SEQ ID NO: 4276 - RNA, 24 nt, synthetic construct
  source 1..24: mol_type = other RNA
caaattaccccacagtggggggtg

SEQ ID NO: 4277 - RNA, 24 nt, synthetic construct
  source 1..24: mol_type = other RNA
aaattaccccacagtggggggtgg

SEQ ID NO: 4278 - RNA, 24 nt, synthetic construct
  source 1..24: mol_type = other RNA
aattaccccacagtggggggtggt

SEQ ID NO: 4279 - RNA, 24 nt, synthetic construct
  source 1..24: mol_type = other RNA
attaccccacagtggggggtggtg

SEQ ID NO: 4280 - RNA, 24 nt, synthetic construct
  source 1..24: mol_type = other RNA
ttaccccacagtggggggtggtga

SEQ ID NO: 4281 - RNA, 24 nt, synthetic construct
  source 1..24: mol_type = other RNA
taccccacagtggggggtggtgaa

SEQ ID NO: 4282 - RNA, 24 nt, synthetic construct
  source 1..24: mol_type = other RNA
accccacagtggggggtggtgaag

SEQ ID NO: 4283 - RNA, 24 nt, synthetic construct
  source 1..24: mol_type = other RNA
ccccacagtggggggtggtgaagt

SEQ ID NO: 4284 - RNA, 24 nt, synthetic construct
  source 1..24: mol_type = other RNA
cccacagtggggggtggtgaagta

SEQ ID NO: 4285 - RNA, 24 nt, synthetic construct
  source 1..24: mol_type = other RNA
ccacagtggggggtggtgaagtat

SEQ ID NO: 4286 - RNA, 24 nt, synthetic construct
  source 1..24: mol_type = other RNA
cacagtggggggtggtgaagtatc

SEQ ID NO: 4287 - RNA, 24 nt, synthetic construct
  source 1..24: mol_type = other RNA
acagtggggggtggtgaagtatct

SEQ ID NO: 4288 - RNA, 24 nt, synthetic construct
  source 1..24: mol_type = other RNA
cagtggggggtggtgaagtatctt

SEQ ID NO: 4289 - RNA, 24 nt, synthetic construct
  source 1..24: mol_type = other RNA
agtggggggtggtgaagtatcttt

SEQ ID NO: 4290 - RNA, 24 nt, synthetic construct
  source 1..24: mol_type = other RNA
gtggggggtggtgaagtatctttc

SEQ ID NO: 4291 - RNA, 24 nt, synthetic construct
  source 1..24: mol_type = other RNA
tggggggtggtgaagtatctttct

SEQ ID NO: 4292 - RNA, 24 nt, synthetic construct
  source 1..24: mol_type = other RNA
ggggggtggtgaagtatctttctc

SEQ ID NO: 4293 - RNA, 24 nt, synthetic construct
  source 1..24: mol_type = other RNA
gggggtggtgaagtatctttctct

SEQ ID NO: 4294 - RNA, 24 nt, synthetic construct
  source 1..24: mol_type = other RNA
ggggtggtgaagtatctttctctg

SEQ ID NO: 4295 - RNA, 24 nt, synthetic construct
  source 1..24: mol_type = other RNA
gggtggtgaagtatctttctctgt

SEQ ID NO: 4296 - RNA, 24 nt, synthetic construct
  source 1..24: mol_type = other RNA
ggtggtgaagtatctttctctgtg

SEQ ID NO: 4297 - RNA, 24 nt, synthetic construct
  source 1..24: mol_type = other RNA
gtggtgaagtatctttctctgtgg

SEQ ID NO: 4298 - RNA, 24 nt, synthetic construct
  source 1..24: mol_type = other RNA
tggtgaagtatctttctctgtggg

SEQ ID NO: 4299 - RNA, 24 nt, synthetic construct
  source 1..24: mol_type = other RNA
ggtgaagtatctttctctgtgggt

SEQ ID NO: 4300 - RNA, 24 nt, synthetic construct
  source 1..24: mol_type = other RNA
gtgaagtatctttctctgtgggtc

SEQ ID NO: 4301 - RNA, 24 nt, synthetic construct
  source 1..24: mol_type = other RNA
tgaagtatctttctctgtgggtct

SEQ ID NO: 4302 - RNA, 24 nt, synthetic construct
  source 1..24: mol_type = other RNA
gaagtatctttctctgtgggtcta

SEQ ID NO: 4303 - RNA, 24 nt, synthetic construct
  source 1..24: mol_type = other RNA
aagtatctttctctgtgggtctag

SEQ ID NO: 4304 - RNA, 24 nt, synthetic construct
  source 1..24: mol_type = other RNA
agtatctttctctgtgggtctagg

SEQ ID NO: 4305 - RNA, 24 nt, synthetic construct
  source 1..24: mol_type = other RNA
gtatctttctctgtgggtctaggg

SEQ ID NO: 4306 - RNA, 24 nt, synthetic construct
  source 1..24: mol_type = other RNA
tatctttctctgtgggtctagggt

SEQ ID NO: 4307 - RNA, 24 nt, synthetic construct
  source 1..24: mol_type = other RNA
atctttctctgtgggtctagggtc

SEQ ID NO: 4308 - RNA, 24 nt, synthetic construct
  source 1..24: mol_type = other RNA
tctttctctgtgggtctagggtct

SEQ ID NO: 4309 - RNA, 24 nt, synthetic construct
  source 1..24: mol_type = other RNA
ctttctctgtgggtctagggtctc

SEQ ID NO: 4310 - RNA, 24 nt, synthetic construct
  source 1..24: mol_type = other RNA
tttctctgtgggtctagggtctct

SEQ ID NO: 4311 - RNA, 24 nt, synthetic construct
  source 1..24: mol_type = other RNA
ttctctgtgggtctagggtctctc

SEQ ID NO: 4312 - RNA, 24 nt, synthetic construct
  source 1..24: mol_type = other RNA
tctctgtgggtctagggtctctct

SEQ ID NO: 4313 - RNA, 24 nt, synthetic construct
  source 1..24: mol_type = other RNA
ctctgtgggtctagggtctctctg

SEQ ID NO: 4314 - RNA, 24 nt, synthetic construct
  source 1..24: mol_type = other RNA
tctgtgggtctagggtctctctgt

SEQ ID NO: 4315 - RNA, 24 nt, synthetic construct
  source 1..24: mol_type = other RNA
ctgtgggtctagggtctctctgtc

SEQ ID NO: 4316 - RNA, 24 nt, synthetic construct
  source 1..24: mol_type = other RNA
tgtgggtctagggtctctctgtct

SEQ ID NO: 4317 - RNA, 24 nt, synthetic construct
  source 1..24: mol_type = other RNA
gtgggtctagggtctctctgtctc

SEQ ID NO: 4318 - RNA, 24 nt, synthetic construct
  source 1..24: mol_type = other RNA
tgggtctagggtctctctgtctca

SEQ ID NO: 4319 - RNA, 24 nt, synthetic construct
  source 1..24: mol_type = other RNA
gggtctagggtctctctgtctcag

SEQ ID NO: 4320 - RNA, 24 nt, synthetic construct
  source 1..24: mol_type = other RNA
ggtctagggtctctctgtctcagg

SEQ ID NO: 4321 - RNA, 24 nt, synthetic construct
  source 1..24: mol_type = other RNA
gtctagggtctctctgtctcaggg

SEQ ID NO: 4322 - RNA, 24 nt, synthetic construct
  source 1..24: mol_type = other RNA
tctagggtctctctgtctcagggt

SEQ ID NO: 4323 - RNA, 24 nt, synthetic construct
  source 1..24: mol_type = other RNA
ctagggtctctctgtctcagggtc

SEQ ID NO: 4324 - RNA, 24 nt, synthetic construct
  source 1..24: mol_type = other RNA
tagggtctctctgtctcagggtct

SEQ ID NO: 4325 - RNA, 24 nt, synthetic construct
  source 1..24: mol_type = other RNA
agggtctctctgtctcagggtctg

SEQ ID NO: 4326 - RNA, 24 nt, synthetic construct
  source 1..24: mol_type = other RNA
gggtctctctgtctcagggtctgg

SEQ ID NO: 4327 - RNA, 24 nt, synthetic construct
  source 1..24: mol_type = other RNA
ggtctctctgtctcagggtctggg

SEQ ID NO: 4328 - RNA, 24 nt, synthetic construct
  source 1..24: mol_type = other RNA
gtctctctgtctcagggtctgggg

SEQ ID NO: 4329 - RNA, 24 nt, synthetic construct
  source 1..24: mol_type = other RNA
tctctctgtctcagggtctggggt

SEQ ID NO: 4330 - RNA, 24 nt, synthetic construct
  source 1..24: mol_type = other RNA
ctctctgtctcagggtctggggtc

SEQ ID NO: 4331 - RNA, 24 nt, synthetic construct
  source 1..24: mol_type = other RNA
tctctgtctcagggtctggggtct

SEQ ID NO: 4332 - RNA, 24 nt, synthetic construct
  source 1..24: mol_type = other RNA
ctctgtctcagggtctggggtctg

SEQ ID NO: 4333 - RNA, 24 nt, synthetic construct
  source 1..24: mol_type = other RNA
tctgtctcagggtctggggtctgc

SEQ ID NO: 4334 - RNA, 24 nt, synthetic construct
  source 1..24: mol_type = other RNA
ctgtctcagggtctggggtctgca

SEQ ID NO: 4335 - RNA, 24 nt, synthetic construct
  source 1..24: mol_type = other RNA
tgtctcagggtctggggtctgcat

SEQ ID NO: 4336 - RNA, 24 nt, synthetic construct
  source 1..24: mol_type = other RNA
gtctcagggtctggggtctgcatc

SEQ ID NO: 4337 - RNA, 24 nt, synthetic construct
  source 1..24: mol_type = other RNA
tctcagggtctggggtctgcatct

SEQ ID NO: 4338 - RNA, 24 nt, synthetic construct
  source 1..24: mol_type = other RNA
ctcagggtctggggtctgcatctt

SEQ ID NO: 4339 - RNA, 24 nt, synthetic construct
  source 1..24: mol_type = other RNA
tcagggtctggggtctgcatcttt

SEQ ID NO: 4340 - RNA, 24 nt, synthetic construct
  source 1..24: mol_type = other RNA
cagggtctggggtctgcatcttta

SEQ ID NO: 4341 - RNA, 24 nt, synthetic construct
  source 1..24: mol_type = other RNA
agggtctggggtctgcatctttag

SEQ ID NO: 4342 - RNA, 24 nt, synthetic construct
  source 1..24: mol_type = other RNA
gggtctggggtctgcatctttagg

SEQ ID NO: 4343 - RNA, 24 nt, synthetic construct
  source 1..24: mol_type = other RNA
ggtctggggtctgcatctttagga

SEQ ID NO: 4344 - RNA, 24 nt, synthetic construct
  source 1..24: mol_type = other RNA
gtctggggtctgcatctttaggac

SEQ ID NO: 4345 - RNA, 24 nt, synthetic construct
  source 1..24: mol_type = other RNA
tctggggtctgcatctttaggacc

SEQ ID NO: 4346 - RNA, 24 nt, synthetic construct
  source 1..24: mol_type = other RNA
ctggggtctgcatctttaggacct

SEQ ID NO: 4347 - RNA, 24 nt, synthetic construct
  source 1..24: mol_type = other RNA
tggggtctgcatctttaggacctc

SEQ ID NO: 4348 - RNA, 24 nt, synthetic construct
  source 1..24: mol_type = other RNA
ggggtctgcatctttaggacctct

SEQ ID NO: 4349 - RNA, 24 nt, synthetic construct
  source 1..24: mol_type = other RNA
gggtctgcatctttaggacctctg

SEQ ID NO: 4350 - RNA, 24 nt, synthetic construct
  source 1..24: mol_type = other RNA
ggtctgcatctttaggacctctgt

SEQ ID NO: 4351 - RNA, 24 nt, synthetic construct
  source 1..24: mol_type = other RNA
gtctgcatctttaggacctctgtc

SEQ ID NO: 4352 - RNA, 24 nt, synthetic construct
  source 1..24: mol_type = other RNA
tctgcatctttaggacctctgtct

SEQ ID NO: 4353 - RNA, 24 nt, synthetic construct
  source 1..24: mol_type = other RNA
ctgcatctttaggacctctgtctc

SEQ ID NO: 4354 - RNA, 24 nt, synthetic construct
  source 1..24: mol_type = other RNA
tgcatctttaggacctctgtctct

SEQ ID NO: 4355 - RNA, 24 nt, synthetic construct
  source 1..24: mol_type = other RNA
gcatctttaggacctctgtctctc

SEQ ID NO: 4356 - RNA, 24 nt, synthetic construct
  source 1..24: mol_type = other RNA
catctttaggacctctgtctctct

SEQ ID NO: 4357 - RNA, 24 nt, synthetic construct
  source 1..24: mol_type = other RNA
atctttaggacctctgtctctctc

SEQ ID NO: 4358 - RNA, 24 nt, synthetic construct
  source 1..24: mol_type = other RNA
tctttaggacctctgtctctctct

SEQ ID NO: 4359 - RNA, 24 nt, synthetic construct
  source 1..24: mol_type = other RNA
ctttaggacctctgtctctctctg

SEQ ID NO: 4360 - RNA, 24 nt, synthetic construct
  source 1..24: mol_type = other RNA
tttaggacctctgtctctctctgg

SEQ ID NO: 4361 - RNA, 24 nt, synthetic construct
  source 1..24: mol_type = other RNA
ttaggacctctgtctctctctggt

SEQ ID NO: 4362 - RNA, 24 nt, synthetic construct
  source 1..24: mol_type = other RNA
taggacctctgtctctctctggtg

SEQ ID NO: 4363 - RNA, 24 nt, synthetic construct
  source 1..24: mol_type = other RNA
aggacctctgtctctctctggtgt

SEQ ID NO: 4364 - RNA, 24 nt, synthetic construct
  source 1..24: mol_type = other RNA
ggacctctgtctctctctggtgtg

SEQ ID NO: 4365 - RNA, 24 nt, synthetic construct
  source 1..24: mol_type = other RNA
gacctctgtctctctctggtgtgt

SEQ ID NO: 4366 - RNA, 24 nt, synthetic construct
  source 1..24: mol_type = other RNA
acctctgtctctctctggtgtgtt

SEQ ID NO: 4367 - RNA, 24 nt, synthetic construct
  source 1..24: mol_type = other RNA
cctctgtctctctctggtgtgttt

SEQ ID NO: 4368 - RNA, 25 nt, synthetic construct
  source 1..25: mol_type = other RNA
gggtctggagtctaagatatctgta

SEQ ID NO: 4369 - RNA, 25 nt, synthetic construct
  source 1..25: mol_type = other RNA
ggtctggagtctaagatatctgtag

SEQ ID NO: 4370 - RNA, 25 nt, synthetic construct
  source 1..25: mol_type = other RNA
gtctggagtctaagatatctgtagg

SEQ ID NO: 4371 - RNA, 25 nt, synthetic construct
  source 1..25: mol_type = other RNA
tctggagtctaagatatctgtaggt

SEQ ID NO: 4372 - RNA, 25 nt, synthetic construct
  source 1..25: mol_type = other RNA
ctggagtctaagatatctgtaggta

SEQ ID NO: 4373 - RNA, 25 nt, synthetic construct
  source 1..25: mol_type = other RNA
tggagtctaagatatctgtaggtat

SEQ ID NO: 4374 - RNA, 25 nt, synthetic construct
  source 1..25: mol_type = other RNA
ggagtctaagatatctgtaggtatg

SEQ ID NO: 4375 - RNA, 25 nt, synthetic construct
  source 1..25: mol_type = other RNA
gagtctaagatatctgtaggtatgg

SEQ ID NO: 4376 - RNA, 25 nt, synthetic construct
  source 1..25: mol_type = other RNA
agtctaagatatctgtaggtatgga

SEQ ID NO: 4377 - RNA, 25 nt, synthetic construct
  source 1..25: mol_type = other RNA
gtctaagatatctgtaggtatggag

SEQ ID NO: 4378 - RNA, 25 nt, synthetic construct
  source 1..25: mol_type = other RNA
tctaagatatctgtaggtatggaga

SEQ ID NO: 4379 - RNA, 25 nt, synthetic construct
  source 1..25: mol_type = other RNA
ctaagatatctgtaggtatggagaa

SEQ ID NO: 4380 - RNA, 25 nt, synthetic construct
  source 1..25: mol_type = other RNA
taagatatctgtaggtatggagaac

SEQ ID NO: 4381 - RNA, 25 nt, synthetic construct
  source 1..25: mol_type = other RNA
aagatatctgtaggtatggagaacc

SEQ ID NO: 4382 - RNA, 25 nt, synthetic construct
  source 1..25: mol_type = other RNA
agatatctgtaggtatggagaaccc

SEQ ID NO: 4383 - RNA, 25 nt, synthetic construct
  source 1..25: mol_type = other RNA
gatatctgtaggtatggagaaccct

SEQ ID NO: 4384 - RNA, 25 nt, synthetic construct
  source 1..25: mol_type = other RNA
atatctgtaggtatggagaaccctt

SEQ ID NO: 4385 - RNA, 25 nt, synthetic construct
  source 1..25: mol_type = other RNA
tatctgtaggtatggagaacccttt

SEQ ID NO: 4386 - RNA, 25 nt, synthetic construct
  source 1..25: mol_type = other RNA
atctgtaggtatggagaaccctttt

SEQ ID NO: 4387 - RNA, 25 nt, synthetic construct
  source 1..25: mol_type = other RNA
tctgtaggtatggagaacccttttt

SEQ ID NO: 4388 - RNA, 25 nt, synthetic construct
  source 1..25: mol_type = other RNA
ctgtaggtatggagaacccttttta

SEQ ID NO: 4389 - RNA, 25 nt, synthetic construct
  source 1..25: mol_type = other RNA
tgtaggtatggagaaccctttttag

SEQ ID NO: 4390 - RNA, 25 nt, synthetic construct
  source 1..25: mol_type = other RNA
gtaggtatggagaaccctttttaga

SEQ ID NO: 4391 - RNA, 25 nt, synthetic construct
  source 1..25: mol_type = other RNA
taggtatggagaaccctttttagac

SEQ ID NO: 4392 - RNA, 25 nt, synthetic construct
  source 1..25: mol_type = other RNA
aggtatggagaaccctttttagact

SEQ ID NO: 4393 - RNA, 25 nt, synthetic construct
  source 1..25: mol_type = other RNA
ggtatggagaaccctttttagactg

SEQ ID NO: 4394 - RNA, 25 nt, synthetic construct
  source 1..25: mol_type = other RNA
gtatggagaaccctttttagactgg

SEQ ID NO: 4395 - RNA, 25 nt, synthetic construct
  source 1..25: mol_type = other RNA
tatggagaaccctttttagactgga

SEQ ID NO: 4396 - RNA, 25 nt, synthetic construct
  source 1..25: mol_type = other RNA
atggagaaccctttttagactggat

SEQ ID NO: 4397 - RNA, 25 nt, synthetic construct
  source 1..25: mol_type = other RNA
tggagaaccctttttagactggatt

SEQ ID NO: 4398 - RNA, 25 nt, synthetic construct
  source 1..25: mol_type = other RNA
ggagaaccctttttagactggattt

SEQ ID NO: 4399 - RNA, 25 nt, synthetic construct
  source 1..25: mol_type = other RNA
gagaaccctttttagactggatttt

SEQ ID NO: 4400 - RNA, 25 nt, synthetic construct
  source 1..25: mol_type = other RNA
agaaccctttttagactggattttc

SEQ ID NO: 4401 - RNA, 25 nt, synthetic construct
  source 1..25: mol_type = other RNA
gaaccctttttagactggattttca

SEQ ID NO: 4402 - RNA, 25 nt, synthetic construct
  source 1..25: mol_type = other RNA
aaccctttttagactggattttcag

SEQ ID NO: 4403 - RNA, 25 nt, synthetic construct
  source 1..25: mol_type = other RNA
accctttttagactggattttcaga

SEQ ID NO: 4404 - RNA, 25 nt, synthetic construct
  source 1..25: mol_type = other RNA
ccctttttagactggattttcagat

SEQ ID NO: 4405 - RNA, 25 nt, synthetic construct
  source 1..25: mol_type = other RNA
cctttttagactggattttcagatt

SEQ ID NO: 4406 - RNA, 25 nt, synthetic construct
  source 1..25: mol_type = other RNA
ctttttagactggattttcagattt

SEQ ID NO: 4407 - RNA, 25 nt, synthetic construct
  source 1..25: mol_type = other RNA
tttttagactggattttcagatttt

SEQ ID NO: 4408 - RNA, 25 nt, synthetic construct
  source 1..25: mol_type = other RNA
ttttagactggattttcagattttg

SEQ ID NO: 4409 - RNA, 25 nt, synthetic construct
  source 1..25: mol_type = other RNA
tttagactggattttcagattttga

SEQ ID NO: 4410 - RNA, 25 nt, synthetic construct
  source 1..25: mol_type = other RNA
ttagactggattttcagattttgat

SEQ ID NO: 4411 - RNA, 25 nt, synthetic construct
  source 1..25: mol_type = other RNA
tagactggattttcagattttgata

SEQ ID NO: 4412 - RNA, 25 nt, synthetic construct
  source 1..25: mol_type = other RNA
agactggattttcagattttgatat

SEQ ID NO: 4413 - RNA, 25 nt, synthetic construct
  source 1..25: mol_type = other RNA
gactggattttcagattttgatatt

SEQ ID NO: 4414 - RNA, 25 nt, synthetic construct
  source 1..25: mol_type = other RNA
actggattttcagattttgatattg

SEQ ID NO: 4415 - RNA, 25 nt, synthetic construct
  source 1..25: mol_type = other RNA
ctggattttcagattttgatattga

SEQ ID NO: 4416 - RNA, 25 nt, synthetic construct
  source 1..25: mol_type = other RNA
tggattttcagattttgatattgag

SEQ ID NO: 4417 - RNA, 25 nt, synthetic construct
  source 1..25: mol_type = other RNA
ggattttcagattttgatattgagc

SEQ ID NO: 4418 - RNA, 25 nt, synthetic construct
  source 1..25: mol_type = other RNA
gattttcagattttgatattgagct

SEQ ID NO: 4419 - RNA, 25 nt, synthetic construct
  source 1..25: mol_type = other RNA
attttcagattttgatattgagctt

SEQ ID NO: 4420 - RNA, 25 nt, synthetic construct
  source 1..25: mol_type = other RNA
ttttcagattttgatattgagcttc

SEQ ID NO: 4421 - RNA, 25 nt, synthetic construct
  source 1..25: mol_type = other RNA
tttcagattttgatattgagcttct

SEQ ID NO: 4422 - RNA, 25 nt, synthetic construct
  source 1..25: mol_type = other RNA
ttcagattttgatattgagcttctc

SEQ ID NO: 4423 - RNA, 25 nt, synthetic construct
  source 1..25: mol_type = other RNA
tcagattttgatattgagcttctct

SEQ ID NO: 4424 - RNA, 25 nt, synthetic construct
  source 1..25: mol_type = other RNA
cagattttgatattgagcttctctc

SEQ ID NO: 4425 - RNA, 25 nt, synthetic construct
  source 1..25: mol_type = other RNA
agattttgatattgagcttctctct

SEQ ID NO: 4426 - RNA, 25 nt, synthetic construct
  source 1..25: mol_type = other RNA
gattttgatattgagcttctctctc

SEQ ID NO: 4427 - RNA, 25 nt, synthetic construct
  source 1..25: mol_type = other RNA
attttgatattgagcttctctctct

SEQ ID NO: 4428 - RNA, 25 nt, synthetic construct
  source 1..25: mol_type = other RNA
ttttgatattgagcttctctctctg

SEQ ID NO: 4429 - RNA, 25 nt, synthetic construct
  source 1..25: mol_type = other RNA
tttgatattgagcttctctctctgg

SEQ ID NO: 4430 - RNA, 25 nt, synthetic construct
  source 1..25: mol_type = other RNA
ttgatattgagcttctctctctggg

SEQ ID NO: 4431 - RNA, 25 nt, synthetic construct
  source 1..25: mol_type = other RNA
tgatattgagcttctctctctgggg

SEQ ID NO: 4432 - RNA, 25 nt, synthetic construct
  source 1..25: mol_type = other RNA
gatattgagcttctctctctggggg

SEQ ID NO: 4433 - RNA, 25 nt, synthetic construct
  source 1..25: mol_type = other RNA
atattgagcttctctctctggggga

SEQ ID NO: 4434 - RNA, 25 nt, synthetic construct
  source 1..25: mol_type = other RNA
tattgagcttctctctctgggggat

SEQ ID NO: 4435 - RNA, 25 nt, synthetic construct
  source 1..25: mol_type = other RNA
attgagcttctctctctgggggatc

SEQ ID NO: 4436 - RNA, 25 nt, synthetic construct
  source 1..25: mol_type = other RNA
ttgagcttctctctctgggggatct

SEQ ID NO: 4437 - RNA, 25 nt, synthetic construct
  source 1..25: mol_type = other RNA
tgagcttctctctctgggggatctg

SEQ ID NO: 4438 - RNA, 25 nt, synthetic construct
  source 1..25: mol_type = other RNA
gagcttctctctctgggggatctgg

SEQ ID NO: 4439 - RNA, 25 nt, synthetic construct
  source 1..25: mol_type = other RNA
agcttctctctctgggggatctggg

SEQ ID NO: 4440 - RNA, 25 nt, synthetic construct
  source 1..25: mol_type = other RNA
gcttctctctctgggggatctgggg

SEQ ID NO: 4441 - RNA, 25 nt, synthetic construct
  source 1..25: mol_type = other RNA
cttctctctctgggggatctggggt

SEQ ID NO: 4442 - RNA, 25 nt, synthetic construct
  source 1..25: mol_type = other RNA
ttctctctctgggggatctggggtc

SEQ ID NO: 4443 - RNA, 25 nt, synthetic construct
  source 1..25: mol_type = other RNA
tctctctctgggggatctggggtcg

SEQ ID NO: 4444 - RNA, 25 nt, synthetic construct
  source 1..25: mol_type = other RNA
ctctctctgggggatctggggtcgt

SEQ ID NO: 4445 - RNA, 25 nt, synthetic construct
  source 1..25: mol_type = other RNA
tctctctgggggatctggggtcgtt

SEQ ID NO: 4446 - RNA, 25 nt, synthetic construct
  source 1..25: mol_type = other RNA
ctctctgggggatctggggtcgttt

SEQ ID NO: 4447 - RNA, 25 nt, synthetic construct
  source 1..25: mol_type = other RNA
tctctgggggatctggggtcgtttt

SEQ ID NO: 4448 - RNA, 25 nt, synthetic construct
  source 1..25: mol_type = other RNA
ctctgggggatctggggtcgttttt

SEQ ID NO: 4449 - RNA, 25 nt, synthetic construct
  source 1..25: mol_type = other RNA
tctgggggatctggggtcgtttttt

SEQ ID NO: 4450 - RNA, 25 nt, synthetic construct
  source 1..25: mol_type = other RNA
ctgggggatctggggtcgttttttc

SEQ ID NO: 4451 - RNA, 25 nt, synthetic construct
  source 1..25: mol_type = other RNA
tgggggatctggggtcgttttttcc

SEQ ID NO: 4452 - RNA, 25 nt, synthetic construct
  source 1..25: mol_type = other RNA
gggggatctggggtcgttttttcct

SEQ ID NO: 4453 - RNA, 25 nt, synthetic construct
  source 1..25: mol_type = other RNA
ggggatctggggtcgttttttcctc

SEQ ID NO: 4454 - RNA, 25 nt, synthetic construct
  source 1..25: mol_type = other RNA
gggatctggggtcgttttttcctca

SEQ ID NO: 4455 - RNA, 25 nt, synthetic construct
  source 1..25: mol_type = other RNA
ggatctggggtcgttttttcctcaa

SEQ ID NO: 4456 - RNA, 25 nt, synthetic construct
  source 1..25: mol_type = other RNA
gatctggggtcgttttttcctcaaa

SEQ ID NO: 4457 - RNA, 25 nt, synthetic construct
  source 1..25: mol_type = other RNA
atctggggtcgttttttcctcaaat

SEQ ID NO: 4458 - RNA, 25 nt, synthetic construct
  source 1..25: mol_type = other RNA
tctggggtcgttttttcctcaaatc

SEQ ID NO: 4459 - RNA, 25 nt, synthetic construct
  source 1..25: mol_type = other RNA
ctggggtcgttttttcctcaaatca

SEQ ID NO: 4460 - RNA, 25 nt, synthetic construct
  source 1..25: mol_type = other RNA
tggggtcgttttttcctcaaatcag

SEQ ID NO: 4461 - RNA, 25 nt, synthetic construct
  source 1..25: mol_type = other RNA
ggggtcgttttttcctcaaatcagg

SEQ ID NO: 4462 - RNA, 25 nt, synthetic construct
  source 1..25: mol_type = other RNA
gggtcgttttttcctcaaatcagga

SEQ ID NO: 4463 - RNA, 25 nt, synthetic construct
  source 1..25: mol_type = other RNA
ggtcgttttttcctcaaatcaggag

SEQ ID NO: 4464 - RNA, 25 nt, synthetic construct
  source 1..25: mol_type = other RNA
gtcgttttttcctcaaatcaggagt

SEQ ID NO: 4465 - RNA, 25 nt, synthetic construct
  source 1..25: mol_type = other RNA
tcgttttttcctcaaatcaggagtc

SEQ ID NO: 4466 - RNA, 25 nt, synthetic construct
  source 1..25: mol_type = other RNA
cgttttttcctcaaatcaggagtct

SEQ ID NO: 4467 - RNA, 25 nt, synthetic construct
  source 1..25: mol_type = other RNA
gttttttcctcaaatcaggagtctc

SEQ ID NO: 4468 - RNA, 25 nt, synthetic construct
  source 1..25: mol_type = other RNA
ttttttcctcaaatcaggagtctct

SEQ ID NO: 4469 - RNA, 25 nt, synthetic construct
  source 1..25: mol_type = other RNA
tttttcctcaaatcaggagtctctt

SEQ ID NO: 4470 - RNA, 25 nt, synthetic construct
  source 1..25: mol_type = other RNA
ttttcctcaaatcaggagtctcttt

SEQ ID NO: 4471 - RNA, 25 nt, synthetic construct
  source 1..25: mol_type = other RNA
tttcctcaaatcaggagtctctttt

SEQ ID NO: 4472 - RNA, 25 nt, synthetic construct
  source 1..25: mol_type = other RNA
ttcctcaaatcaggagtctcttttc

SEQ ID NO: 4473 - RNA, 25 nt, synthetic construct
  source 1..25: mol_type = other RNA
tcctcaaatcaggagtctcttttcc

SEQ ID NO: 4474 - RNA, 25 nt, synthetic construct
  source 1..25: mol_type = other RNA
cctcaaatcaggagtctcttttcct

SEQ ID NO: 4475 - RNA, 25 nt, synthetic construct
  source 1..25: mol_type = other RNA
ctcaaatcaggagtctcttttcctc

SEQ ID NO: 4476 - RNA, 25 nt, synthetic construct
  source 1..25: mol_type = other RNA
tcaaatcaggagtctcttttcctct

SEQ ID NO: 4477 - RNA, 25 nt, synthetic construct
  source 1..25: mol_type = other RNA
caaatcaggagtctcttttcctcta

SEQ ID NO: 4478 - RNA, 25 nt, synthetic construct
  source 1..25: mol_type = other RNA
aaatcaggagtctcttttcctctag

SEQ ID NO: 4479 - RNA, 25 nt, synthetic construct
  source 1..25: mol_type = other RNA
aatcaggagtctcttttcctctaga

SEQ ID NO: 4480 - RNA, 25 nt, synthetic construct
  source 1..25: mol_type = other RNA
atcaggagtctcttttcctctagat

SEQ ID NO: 4481 - RNA, 25 nt, synthetic construct
  source 1..25: mol_type = other RNA
tcaggagtctcttttcctctagatt

SEQ ID NO: 4482 - RNA, 25 nt, synthetic construct
  source 1..25: mol_type = other RNA
caggagtctcttttcctctagattt

SEQ ID NO: 4483 - RNA, 25 nt, synthetic construct
  source 1..25: mol_type = other RNA
aggagtctcttttcctctagatttt

SEQ ID NO: 4484 - RNA, 25 nt, synthetic construct
  source 1..25: mol_type = other RNA
ggagtctcttttcctctagattttg

SEQ ID NO: 4485 - RNA, 25 nt, synthetic construct
  source 1..25: mol_type = other RNA
gagtctcttttcctctagattttgg

SEQ ID NO: 4486 - RNA, 25 nt, synthetic construct
  source 1..25: mol_type = other RNA
agtctcttttcctctagattttggc

SEQ ID NO: 4487 - RNA, 25 nt, synthetic construct
  source 1..25: mol_type = other RNA
gtctcttttcctctagattttggcc

SEQ ID NO: 4488 - RNA, 25 nt, synthetic construct
  source 1..25: mol_type = other RNA
tctcttttcctctagattttggccc

SEQ ID NO: 4489 - RNA, 25 nt, synthetic construct
  source 1..25: mol_type = other RNA
ctcttttcctctagattttggccct

SEQ ID NO: 4490 - RNA, 25 nt, synthetic construct
  source 1..25: mol_type = other RNA
tcttttcctctagattttggccctg

SEQ ID NO: 4491 - RNA, 25 nt, synthetic construct
  source 1..25: mol_type = other RNA
cttttcctctagattttggccctgt

SEQ ID NO: 4492 - RNA, 25 nt, synthetic construct
  source 1..25: mol_type = other RNA
ttttcctctagattttggccctgtg

SEQ ID NO: 4493 - RNA, 25 nt, synthetic construct
  source 1..25: mol_type = other RNA
tttcctctagattttggccctgtgt

SEQ ID NO: 4494 - RNA, 25 nt, synthetic construct
  source 1..25: mol_type = other RNA
ttcctctagattttggccctgtgtc

SEQ ID NO: 4495 - RNA, 25 nt, synthetic construct
  source 1..25: mol_type = other RNA
tcctctagattttggccctgtgtct

SEQ ID NO: 4496 - RNA, 25 nt, synthetic construct
  source 1..25: mol_type = other RNA
cctctagattttggccctgtgtctc

SEQ ID NO: 4497 - RNA, 25 nt, synthetic construct
  source 1..25: mol_type = other RNA
ctctagattttggccctgtgtctca

SEQ ID NO: 4498 - RNA, 25 nt, synthetic construct
  source 1..25: mol_type = other RNA
tctagattttggccctgtgtctcaa

SEQ ID NO: 4499 - RNA, 25 nt, synthetic construct
  source 1..25: mol_type = other RNA
ctagattttggccctgtgtctcaaa

SEQ ID NO: 4500 - RNA, 25 nt, synthetic construct
  source 1..25: mol_type = other RNA
tagattttggccctgtgtctcaaat

SEQ ID NO: 4501 - RNA, 25 nt, synthetic construct
  source 1..25: mol_type = other RNA
agattttggccctgtgtctcaaatt

SEQ ID NO: 4502 - RNA, 25 nt, synthetic construct
  source 1..25: mol_type = other RNA
gattttggccctgtgtctcaaatta

SEQ ID NO: 4503 - RNA, 25 nt, synthetic construct
  source 1..25: mol_type = other RNA
attttggccctgtgtctcaaattac

SEQ ID NO: 4504 - RNA, 25 nt, synthetic construct
  source 1..25: mol_type = other RNA
ttttggccctgtgtctcaaattacc

SEQ ID NO: 4505 - RNA, 25 nt, synthetic construct
  source 1..25: mol_type = other RNA
tttggccctgtgtctcaaattaccc

SEQ ID NO: 4506 - RNA, 25 nt, synthetic construct
  source 1..25: mol_type = other RNA
ttggccctgtgtctcaaattacccc

SEQ ID NO: 4507 - RNA, 25 nt, synthetic construct
  source 1..25: mol_type = other RNA
tggccctgtgtctcaaattacccca

SEQ ID NO: 4508 - RNA, 25 nt, synthetic construct
  source 1..25: mol_type = other RNA
ggccctgtgtctcaaattaccccac

SEQ ID NO: 4509 - RNA, 25 nt, synthetic construct
  source 1..25: mol_type = other RNA
gccctgtgtctcaaattaccccaca

SEQ ID NO: 4510 - RNA, 25 nt, synthetic construct
  source 1..25: mol_type = other RNA
ccctgtgtctcaaattaccccacag

SEQ ID NO: 4511 - RNA, 25 nt, synthetic construct
  source 1..25: mol_type = other RNA
cctgtgtctcaaattaccccacagt

SEQ ID NO: 4512 - RNA, 25 nt, synthetic construct
  source 1..25: mol_type = other RNA
ctgtgtctcaaattaccccacagtg

SEQ ID NO: 4513 - RNA, 25 nt, synthetic construct
  source 1..25: mol_type = other RNA
tgtgtctcaaattaccccacagtgg

SEQ ID NO: 4514 - RNA, 25 nt, synthetic construct
  source 1..25: mol_type = other RNA
gtgtctcaaattaccccacagtggg

SEQ ID NO: 4515 - RNA, 25 nt, synthetic construct
  source 1..25: mol_type = other RNA
tgtctcaaattaccccacagtgggg

SEQ ID NO: 4516 - RNA, 25 nt, synthetic construct
  source 1..25: mol_type = other RNA
gtctcaaattaccccacagtggggg

SEQ ID NO: 4517 - RNA, 25 nt, synthetic construct
  source 1..25: mol_type = other RNA
tctcaaattaccccacagtgggggg

SEQ ID NO: 4518 - RNA, 25 nt, synthetic construct
  source 1..25: mol_type = other RNA
ctcaaattaccccacagtggggggt

SEQ ID NO: 4519 - RNA, 25 nt, synthetic construct
  source 1..25: mol_type = other RNA
tcaaattaccccacagtggggggtg

SEQ ID NO: 4520 - RNA, 25 nt, synthetic construct
  source 1..25: mol_type = other RNA
caaattaccccacagtggggggtgg

SEQ ID NO: 4521 - RNA, 25 nt, synthetic construct
  source 1..25: mol_type = other RNA
aaattaccccacagtggggggtggt

SEQ ID NO: 4522 - RNA, 25 nt, synthetic construct
  source 1..25: mol_type = other RNA
aattaccccacagtggggggtggtg

SEQ ID NO: 4523 - RNA, 25 nt, synthetic construct
  source 1..25: mol_type = other RNA
attaccccacagtggggggtggtga

SEQ ID NO: 4524 - RNA, 25 nt, synthetic construct
  source 1..25: mol_type = other RNA
ttaccccacagtggggggtggtgaa

SEQ ID NO: 4525 - RNA, 25 nt, synthetic construct
  source 1..25: mol_type = other RNA
taccccacagtggggggtggtgaag

SEQ ID NO: 4526 - RNA, 25 nt, synthetic construct
  source 1..25: mol_type = other RNA
accccacagtggggggtggtgaagt

SEQ ID NO: 4527 - RNA, 25 nt, synthetic construct
  source 1..25: mol_type = other RNA
ccccacagtggggggtggtgaagta

SEQ ID NO: 4528 - RNA, 25 nt, synthetic construct
  source 1..25: mol_type = other RNA
cccacagtggggggtggtgaagtat

SEQ ID NO: 4529 - RNA, 25 nt, synthetic construct
  source 1..25: mol_type = other RNA
ccacagtggggggtggtgaagtatc

SEQ ID NO: 4530 - RNA, 25 nt, synthetic construct
  source 1..25: mol_type = other RNA
cacagtggggggtggtgaagtatct

SEQ ID NO: 4531 - RNA, 25 nt, synthetic construct
  source 1..25: mol_type = other RNA
acagtggggggtggtgaagtatctt

SEQ ID NO: 4532 - RNA, 25 nt, synthetic construct
  source 1..25: mol_type = other RNA
cagtggggggtggtgaagtatcttt

SEQ ID NO: 4533 - RNA, 25 nt, synthetic construct
  source 1..25: mol_type = other RNA
agtggggggtggtgaagtatctttc

SEQ ID NO: 4534 - RNA, 25 nt, synthetic construct
  source 1..25: mol_type = other RNA
gtggggggtggtgaagtatctttct

SEQ ID NO: 4535 - RNA, 25 nt, synthetic construct
  source 1..25: mol_type = other RNA
tggggggtggtgaagtatctttctc

SEQ ID NO: 4536 - RNA, 25 nt, synthetic construct
  source 1..25: mol_type = other RNA
ggggggtggtgaagtatctttctct

SEQ ID NO: 4537 - RNA, 25 nt, synthetic construct
  source 1..25: mol_type = other RNA
gggggtggtgaagtatctttctctg

SEQ ID NO: 4538 - RNA, 25 nt, synthetic construct
  source 1..25: mol_type = other RNA
ggggtggtgaagtatctttctctgt

SEQ ID NO: 4539 - RNA, 25 nt, synthetic construct
  source 1..25: mol_type = other RNA
gggtggtgaagtatctttctctgtg

SEQ ID NO: 4540 - RNA, 25 nt, synthetic construct
  source 1..25: mol_type = other RNA
ggtggtgaagtatctttctctgtgg

SEQ ID NO: 4541 - RNA, 25 nt, synthetic construct
  source 1..25: mol_type = other RNA
gtggtgaagtatctttctctgtggg

SEQ ID NO: 4542 - RNA, 25 nt, synthetic construct
  source 1..25: mol_type = other RNA
tggtgaagtatctttctctgtgggt

SEQ ID NO: 4543 - RNA, 25 nt, synthetic construct
  source 1..25: mol_type = other RNA
ggtgaagtatctttctctgtgggtc

SEQ ID NO: 4544 - RNA, 25 nt, synthetic construct
  source 1..25: mol_type = other RNA
gtgaagtatctttctctgtgggtct

SEQ ID NO: 4545 - RNA, 25 nt, synthetic construct
  source 1..25: mol_type = other RNA
tgaagtatctttctctgtgggtcta

SEQ ID NO: 4546 - RNA, 25 nt, synthetic construct
  source 1..25: mol_type = other RNA
gaagtatctttctctgtgggtctag

SEQ ID NO: 4547 - RNA, 25 nt, synthetic construct
  source 1..25: mol_type = other RNA
aagtatctttctctgtgggtctagg

SEQ ID NO: 4548 - RNA, 25 nt, synthetic construct
  source 1..25: mol_type = other RNA
agtatctttctctgtgggtctaggg

SEQ ID NO: 4549 - RNA, 25 nt, synthetic construct
  source 1..25: mol_type = other RNA
gtatctttctctgtgggtctagggt

SEQ ID NO: 4550 - RNA, 25 nt, synthetic construct
  source 1..25: mol_type = other RNA
tatctttctctgtgggtctagggtc

SEQ ID NO: 4551 - RNA, 25 nt, synthetic construct
  source 1..25: mol_type = other RNA
atctttctctgtgggtctagggtct

SEQ ID NO: 4552 - RNA, 25 nt, synthetic construct
  source 1..25: mol_type = other RNA
tctttctctgtgggtctagggtctc

SEQ ID NO: 4553 - RNA, 25 nt, synthetic construct
  source 1..25: mol_type = other RNA
ctttctctgtgggtctagggtctct

SEQ ID NO: 4554 - RNA, 25 nt, synthetic construct
  source 1..25: mol_type = other RNA
tttctctgtgggtctagggtctctc

SEQ ID NO: 4555 - RNA, 25 nt, synthetic construct
  source 1..25: mol_type = other RNA
ttctctgtgggtctagggtctctct

SEQ ID NO: 4556 - RNA, 25 nt, synthetic construct
  source 1..25: mol_type = other RNA
tctctgtgggtctagggtctctctg

SEQ ID NO: 4557 - RNA, 25 nt, synthetic construct
  source 1..25: mol_type = other RNA
ctctgtgggtctagggtctctctgt

SEQ ID NO: 4558 - RNA, 25 nt, synthetic construct
  source 1..25: mol_type = other RNA
tctgtgggtctagggtctctctgtc

SEQ ID NO: 4559 - RNA, 25 nt, synthetic construct
  source 1..25: mol_type = other RNA
ctgtgggtctagggtctctctgtct

SEQ ID NO: 4560 - RNA, 25 nt, synthetic construct
  source 1..25: mol_type = other RNA
tgtgggtctagggtctctctgtctc

SEQ ID NO: 4561 - RNA, 25 nt, synthetic construct
  source 1..25: mol_type = other RNA
gtgggtctagggtctctctgtctca

SEQ ID NO: 4562 - RNA, 25 nt, synthetic construct
  source 1..25: mol_type = other RNA
tgggtctagggtctctctgtctcag

SEQ ID NO: 4563 - RNA, 25 nt, synthetic construct
  source 1..25: mol_type = other RNA
gggtctagggtctctctgtctcagg

SEQ ID NO: 4564 - RNA, 25 nt, synthetic construct
  source 1..25: mol_type = other RNA
ggtctagggtctctctgtctcaggg

SEQ ID NO: 4565 - RNA, 25 nt, synthetic construct
  source 1..25: mol_type = other RNA
gtctagggtctctctgtctcagggt

SEQ ID NO: 4566 - RNA, 25 nt, synthetic construct
  source 1..25: mol_type = other RNA
tctagggtctctctgtctcagggtc

SEQ ID NO: 4567 - RNA, 25 nt, synthetic construct
  source 1..25: mol_type = other RNA
ctagggtctctctgtctcagggtct

SEQ ID NO: 4568 - RNA, 25 nt, synthetic construct
  source 1..25: mol_type = other RNA
tagggtctctctgtctcagggtctg

SEQ ID NO: 4569 - RNA, 25 nt, synthetic construct
  source 1..25: mol_type = other RNA
agggtctctctgtctcagggtctgg

SEQ ID NO: 4570 - RNA, 25 nt, synthetic construct
  source 1..25: mol_type = other RNA
gggtctctctgtctcagggtctggg

SEQ ID NO: 4571 - RNA, 25 nt, synthetic construct
  source 1..25: mol_type = other RNA
ggtctctctgtctcagggtctgggg

SEQ ID NO: 4572 - RNA, 25 nt, synthetic construct
  source 1..25: mol_type = other RNA
gtctctctgtctcagggtctggggt

SEQ ID NO: 4573 - RNA, 25 nt, synthetic construct
  source 1..25: mol_type = other RNA
tctctctgtctcagggtctggggtc

SEQ ID NO: 4574 - RNA, 25 nt, synthetic construct
  source 1..25: mol_type = other RNA
ctctctgtctcagggtctggggtct

SEQ ID NO: 4575 - RNA, 25 nt, synthetic construct
  source 1..25: mol_type = other RNA
tctctgtctcagggtctggggtctg

SEQ ID NO: 4576 - RNA, 25 nt, synthetic construct
  source 1..25: mol_type = other RNA
ctctgtctcagggtctggggtctgc

SEQ ID NO: 4577 - RNA, 25 nt, synthetic construct
  source 1..25: mol_type = other RNA
tctgtctcagggtctggggtctgca

SEQ ID NO: 4578 - RNA, 25 nt, synthetic construct
  source 1..25: mol_type = other RNA
ctgtctcagggtctggggtctgcat

SEQ ID NO: 4579 - RNA, 25 nt, synthetic construct
  source 1..25: mol_type = other RNA
tgtctcagggtctggggtctgcatc

SEQ ID NO: 4580 - RNA, 25 nt, synthetic construct
  source 1..25: mol_type = other RNA
gtctcagggtctggggtctgcatct

SEQ ID NO: 4581 - RNA, 25 nt, synthetic construct
  source 1..25: mol_type = other RNA
tctcagggtctggggtctgcatctt

SEQ ID NO: 4582 - RNA, 25 nt, synthetic construct
  source 1..25: mol_type = other RNA
ctcagggtctggggtctgcatcttt

SEQ ID NO: 4583 - RNA, 25 nt, synthetic construct
  source 1..25: mol_type = other RNA
tcagggtctggggtctgcatcttta

SEQ ID NO: 4584 - RNA, 25 nt, synthetic construct
  source 1..25: mol_type = other RNA
cagggtctggggtctgcatctttag

SEQ ID NO: 4585 - RNA, 25 nt, synthetic construct
  source 1..25: mol_type = other RNA
agggtctggggtctgcatctttagg

SEQ ID NO: 4586 - RNA, 25 nt, synthetic construct
  source 1..25: mol_type = other RNA
gggtctggggtctgcatctttagga

SEQ ID NO: 4587 - RNA, 25 nt, synthetic construct
  source 1..25: mol_type = other RNA
ggtctggggtctgcatctttaggac

SEQ ID NO: 4588 - RNA, 25 nt, synthetic construct
  source 1..25: mol_type = other RNA
gtctggggtctgcatctttaggacc

SEQ ID NO: 4589 - RNA, 25 nt, synthetic construct
  source 1..25: mol_type = other RNA
tctggggtctgcatctttaggacct

SEQ ID NO: 4590 - RNA, 25 nt, synthetic construct
  source 1..25: mol_type = other RNA
ctggggtctgcatctttaggacctc

SEQ ID NO: 4591 - RNA, 25 nt, synthetic construct
  source 1..25: mol_type = other RNA
tggggtctgcatctttaggacctct

SEQ ID NO: 4592 - RNA, 25 nt, synthetic construct
  source 1..25: mol_type = other RNA
ggggtctgcatctttaggacctctg

SEQ ID NO: 4593 - RNA, 25 nt, synthetic construct
  source 1..25: mol_type = other RNA
gggtctgcatctttaggacctctgt

SEQ ID NO: 4594 - RNA, 25 nt, synthetic construct
  source 1..25: mol_type = other RNA
ggtctgcatctttaggacctctgtc

SEQ ID NO: 4595 - RNA, 25 nt, synthetic construct
  source 1..25: mol_type = other RNA
gtctgcatctttaggacctctgtct

SEQ ID NO: 4596 - RNA, 25 nt, synthetic construct
  source 1..25: mol_type = other RNA
tctgcatctttaggacctctgtctc

SEQ ID NO: 4597 - RNA, 25 nt, synthetic construct
  source 1..25: mol_type = other RNA
ctgcatctttaggacctctgtctct

SEQ ID NO: 4598 - RNA, 25 nt, synthetic construct
  source 1..25: mol_type = other RNA
tgcatctttaggacctctgtctctc

SEQ ID NO: 4599 - RNA, 25 nt, synthetic construct
  source 1..25: mol_type = other RNA
gcatctttaggacctctgtctctct

SEQ ID NO: 4600 - RNA, 25 nt, synthetic construct
  source 1..25: mol_type = other RNA
catctttaggacctctgtctctctc

SEQ ID NO: 4601 - RNA, 25 nt, synthetic construct
  source 1..25: mol_type = other RNA
atctttaggacctctgtctctctct

SEQ ID NO: 4602 - RNA, 25 nt, synthetic construct
  source 1..25: mol_type = other RNA
tctttaggacctctgtctctctctg

SEQ ID NO: 4603 - RNA, 25 nt, synthetic construct
  source 1..25: mol_type = other RNA
ctttaggacctctgtctctctctgg

SEQ ID NO: 4604 - RNA, 25 nt, synthetic construct
  source 1..25: mol_type = other RNA
tttaggacctctgtctctctctggt

SEQ ID NO: 4605 - RNA, 25 nt, synthetic construct
  source 1..25: mol_type = other RNA
ttaggacctctgtctctctctggtg

SEQ ID NO: 4606 - RNA, 25 nt, synthetic construct
  source 1..25: mol_type = other RNA
taggacctctgtctctctctggtgt

SEQ ID NO: 4607 - RNA, 25 nt, synthetic construct
  source 1..25: mol_type = other RNA
aggacctctgtctctctctggtgtg

SEQ ID NO: 4608 - RNA, 25 nt, synthetic construct
  source 1..25: mol_type = other RNA
ggacctctgtctctctctggtgtgt

SEQ ID NO: 4609 - RNA, 25 nt, synthetic construct
  source 1..25: mol_type = other RNA
gacctctgtctctctctggtgtgtt

SEQ ID NO: 4610 - RNA, 25 nt, synthetic construct
  source 1..25: mol_type = other RNA
acctctgtctctctctggtgtgttt

SEQ ID NO: 4611 - RNA, 26 nt, synthetic construct
  source 1..26: mol_type = other RNA
gggtctggagtctaagatatctgtag

SEQ ID NO: 4612 - RNA, 26 nt, synthetic construct
  source 1..26: mol_type = other RNA
ggtctggagtctaagatatctgtagg

SEQ ID NO: 4613 - RNA, 26 nt, synthetic construct
  source 1..26: mol_type = other RNA
gtctggagtctaagatatctgtaggt

SEQ ID NO: 4614 - RNA, 26 nt, synthetic construct
  source 1..26: mol_type = other RNA
tctggagtctaagatatctgtaggta

SEQ ID NO: 4615 - RNA, 26 nt, synthetic construct
  source 1..26: mol_type = other RNA
ctggagtctaagatatctgtaggtat

SEQ ID NO: 4616 - RNA, 26 nt, synthetic construct
  source 1..26: mol_type = other RNA
tggagtctaagatatctgtaggtatg

SEQ ID NO: 4617 - RNA, 26 nt, synthetic construct
  source 1..26: mol_type = other RNA
ggagtctaagatatctgtaggtatgg

SEQ ID NO: 4618 - RNA, 26 nt, synthetic construct
  source 1..26: mol_type = other RNA
gagtctaagatatctgtaggtatgga

SEQ ID NO: 4619 - RNA, 26 nt, synthetic construct
  source 1..26: mol_type = other RNA
agtctaagatatctgtaggtatggag

SEQ ID NO: 4620 - RNA, 26 nt, synthetic construct
  source 1..26: mol_type = other RNA
gtctaagatatctgtaggtatggaga

SEQ ID NO: 4621 - RNA, 26 nt, synthetic construct
  source 1..26: mol_type = other RNA
tctaagatatctgtaggtatggagaa

SEQ ID NO: 4622 - RNA, 26 nt, synthetic construct
  source 1..26: mol_type = other RNA
ctaagatatctgtaggtatggagaac

SEQ ID NO: 4623 - RNA, 26 nt, synthetic construct
  source 1..26: mol_type = other RNA
taagatatctgtaggtatggagaacc

SEQ ID NO: 4624 - RNA, 26 nt, synthetic construct
  source 1..26: mol_type = other RNA
aagatatctgtaggtatggagaaccc

SEQ ID NO: 4625 - RNA, 26 nt, synthetic construct
  source 1..26: mol_type = other RNA
agatatctgtaggtatggagaaccct

SEQ ID NO: 4626 - RNA, 26 nt, synthetic construct
  source 1..26: mol_type = other RNA
gatatctgtaggtatggagaaccctt

SEQ ID NO: 4627 - RNA, 26 nt, synthetic construct
  source 1..26: mol_type = other RNA
atatctgtaggtatggagaacccttt

SEQ ID NO: 4628 - RNA, 26 nt, synthetic construct
  source 1..26: mol_type = other RNA
tatctgtaggtatggagaaccctttt

SEQ ID NO: 4629 - RNA, 26 nt, synthetic construct
  source 1..26: mol_type = other RNA
atctgtaggtatggagaacccttttt

SEQ ID NO: 4630 - RNA, 26 nt, synthetic construct
  source 1..26: mol_type = other RNA
tctgtaggtatggagaacccttttta

SEQ ID NO: 4631 - RNA, 26 nt, synthetic construct
  source 1..26: mol_type = other RNA
ctgtaggtatggagaaccctttttag

SEQ ID NO: 4632 - RNA, 26 nt, synthetic construct
  source 1..26: mol_type = other RNA
tgtaggtatggagaaccctttttaga

SEQ ID NO: 4633 - RNA, 26 nt, synthetic construct
  source 1..26: mol_type = other RNA
gtaggtatggagaaccctttttagac

SEQ ID NO: 4634 - RNA, 26 nt, synthetic construct
  source 1..26: mol_type = other RNA
taggtatggagaaccctttttagact

SEQ ID NO: 4635 - RNA, 26 nt, synthetic construct
  source 1..26: mol_type = other RNA
aggtatggagaaccctttttagactg

SEQ ID NO: 4636 - RNA, 26 nt, synthetic construct
  source 1..26: mol_type = other RNA
ggtatggagaaccctttttagactgg

SEQ ID NO: 4637 - RNA, 26 nt, synthetic construct
  source 1..26: mol_type = other RNA
gtatggagaaccctttttagactgga

SEQ ID NO: 4638 - RNA, 26 nt, synthetic construct
  source 1..26: mol_type = other RNA
tatggagaaccctttttagactggat

SEQ ID NO: 4639 - RNA, 26 nt, synthetic construct
  source 1..26: mol_type = other RNA
atggagaaccctttttagactggatt

SEQ ID NO: 4640 - RNA, 26 nt, synthetic construct
  source 1..26: mol_type = other RNA
tggagaaccctttttagactggattt

SEQ ID NO: 4641 - RNA, 26 nt, synthetic construct
  source 1..26: mol_type = other RNA
ggagaaccctttttagactggatttt

SEQ ID NO: 4642 - RNA, 26 nt, synthetic construct
  source 1..26: mol_type = other RNA
gagaaccctttttagactggattttc

SEQ ID NO: 4643 - RNA, 26 nt, synthetic construct
  source 1..26: mol_type = other RNA
agaaccctttttagactggattttca

SEQ ID NO: 4644 - RNA, 26 nt, synthetic construct
  source 1..26: mol_type = other RNA
gaaccctttttagactggattttcag

SEQ ID NO: 4645 - RNA, 26 nt, synthetic construct
  source 1..26: mol_type = other RNA
aaccctttttagactggattttcaga

SEQ ID NO: 4646 - RNA, 26 nt, synthetic construct
  source 1..26: mol_type = other RNA
accctttttagactggattttcagat

SEQ ID NO: 4647 - RNA, 26 nt, synthetic construct
  source 1..26: mol_type = other RNA
ccctttttagactggattttcagatt

SEQ ID NO: 4648 - RNA, 26 nt, synthetic construct
  source 1..26: mol_type = other RNA
cctttttagactggattttcagattt

SEQ ID NO: 4649 - RNA, 26 nt, synthetic construct
  source 1..26: mol_type = other RNA
ctttttagactggattttcagatttt

SEQ ID NO: 4650 - RNA, 26 nt, synthetic construct
  source 1..26: mol_type = other RNA
tttttagactggattttcagattttg

SEQ ID NO: 4651 - RNA, 26 nt, synthetic construct
  source 1..26: mol_type = other RNA
ttttagactggattttcagattttga

SEQ ID NO: 4652 - RNA, 26 nt, synthetic construct
  source 1..26: mol_type = other RNA
tttagactggattttcagattttgat

SEQ ID NO: 4653 - RNA, 26 nt, synthetic construct
  source 1..26: mol_type = other RNA
ttagactggattttcagattttgata

SEQ ID NO: 4654 - RNA, 26 nt, synthetic construct
  source 1..26: mol_type = other RNA
tagactggattttcagattttgatat

SEQ ID NO: 4655 - RNA, 26 nt, synthetic construct
  source 1..26: mol_type = other RNA
agactggattttcagattttgatatt

SEQ ID NO: 4656 - RNA, 26 nt, synthetic construct
  source 1..26: mol_type = other RNA
gactggattttcagattttgatattg

SEQ ID NO: 4657 - RNA, 26 nt, synthetic construct
  source 1..26: mol_type = other RNA
actggattttcagattttgatattga

SEQ ID NO: 4658 - RNA, 26 nt, synthetic construct
  source 1..26: mol_type = other RNA
ctggattttcagattttgatattgag

SEQ ID NO: 4659 - RNA, 26 nt, synthetic construct
  source 1..26: mol_type = other RNA
tggattttcagattttgatattgagc

SEQ ID NO: 4660 - RNA, 26 nt, synthetic construct
  source 1..26: mol_type = other RNA
ggattttcagattttgatattgagct

SEQ ID NO: 4661 - RNA, 26 nt, synthetic construct
  source 1..26: mol_type = other RNA
gattttcagattttgatattgagctt

SEQ ID NO: 4662 - RNA, 26 nt, synthetic construct
  source 1..26: mol_type = other RNA
attttcagattttgatattgagcttc

SEQ ID NO: 4663 - RNA, 26 nt, synthetic construct
  source 1..26: mol_type = other RNA
ttttcagattttgatattgagcttct

SEQ ID NO: 4664 - RNA, 26 nt, synthetic construct
  source 1..26: mol_type = other RNA
tttcagattttgatattgagcttctc

SEQ ID NO: 4665 - RNA, 26 nt, synthetic construct
  source 1..26: mol_type = other RNA
ttcagattttgatattgagcttctct

SEQ ID NO: 4666 - RNA, 26 nt, synthetic construct
  source 1..26: mol_type = other RNA
tcagattttgatattgagcttctctc

SEQ ID NO: 4667 - RNA, 26 nt, synthetic construct
  source 1..26: mol_type = other RNA
cagattttgatattgagcttctctct

SEQ ID NO: 4668 - RNA, 26 nt, synthetic construct
  source 1..26: mol_type = other RNA
agattttgatattgagcttctctctc

SEQ ID NO: 4669 - RNA, 26 nt, synthetic construct
  source 1..26: mol_type = other RNA
gattttgatattgagcttctctctct

SEQ ID NO: 4670 - RNA, 26 nt, synthetic construct
  source 1..26: mol_type = other RNA
attttgatattgagcttctctctctg

SEQ ID NO: 4671 - RNA, 26 nt, synthetic construct
  source 1..26: mol_type = other RNA
ttttgatattgagcttctctctctgg

SEQ ID NO: 4672 - RNA, 26 nt, synthetic construct
  source 1..26: mol_type = other RNA
tttgatattgagcttctctctctggg

SEQ ID NO: 4673 - RNA, 26 nt, synthetic construct
  source 1..26: mol_type = other RNA
ttgatattgagcttctctctctgggg

SEQ ID NO: 4674 - RNA, 26 nt, synthetic construct
  source 1..26: mol_type = other RNA
tgatattgagcttctctctctggggg

SEQ ID NO: 4675 - RNA, 26 nt, synthetic construct
  source 1..26: mol_type = other RNA
gatattgagcttctctctctggggga

SEQ ID NO: 4676 - RNA, 26 nt, synthetic construct
  source 1..26: mol_type = other RNA
atattgagcttctctctctgggggat

SEQ ID NO: 4677 - RNA, 26 nt, synthetic construct
  source 1..26: mol_type = other RNA
tattgagcttctctctctgggggatc

SEQ ID NO: 4678 - RNA, 26 nt, synthetic construct
  source 1..26: mol_type = other RNA
attgagcttctctctctgggggatct

SEQ ID NO: 4679 - RNA, 26 nt, synthetic construct
  source 1..26: mol_type = other RNA
ttgagcttctctctctgggggatctg

SEQ ID NO: 4680 - RNA, 26 nt, synthetic construct
  source 1..26: mol_type = other RNA
tgagcttctctctctgggggatctgg

SEQ ID NO: 4681 - RNA, 26 nt, synthetic construct
  source 1..26: mol_type = other RNA
gagcttctctctctgggggatctggg

SEQ ID NO: 4682 - RNA, 26 nt, synthetic construct
  source 1..26: mol_type = other RNA
agcttctctctctgggggatctgggg

SEQ ID NO: 4683 - RNA, 26 nt, synthetic construct
  source 1..26: mol_type = other RNA
gcttctctctctgggggatctggggt

SEQ ID NO: 4684 - RNA, 26 nt, synthetic construct
  source 1..26: mol_type = other RNA
cttctctctctgggggatctggggtc

SEQ ID NO: 4685 - RNA, 26 nt, synthetic construct
  source 1..26: mol_type = other RNA
ttctctctctgggggatctggggtcg

SEQ ID NO: 4686 - RNA, 26 nt, synthetic construct
  source 1..26: mol_type = other RNA
tctctctctgggggatctggggtcgt

SEQ ID NO: 4687 - RNA, 26 nt, synthetic construct
  source 1..26: mol_type = other RNA
ctctctctgggggatctggggtcgtt

SEQ ID NO: 4688 - RNA, 26 nt, synthetic construct
  source 1..26: mol_type = other RNA
tctctctgggggatctggggtcgttt

SEQ ID NO: 4689 - RNA, 26 nt, synthetic construct
  source 1..26: mol_type = other RNA
ctctctgggggatctggggtcgtttt

SEQ ID NO: 4690 - RNA, 26 nt, synthetic construct
  source 1..26: mol_type = other RNA
tctctgggggatctggggtcgttttt

SEQ ID NO: 4691 - RNA, 26 nt, synthetic construct
  source 1..26: mol_type = other RNA
ctctgggggatctggggtcgtttttt

SEQ ID NO: 4692 - RNA, 26 nt, synthetic construct
  source 1..26: mol_type = other RNA
tctgggggatctggggtcgttttttc

SEQ ID NO: 4693 - RNA, 26 nt, synthetic construct
  source 1..26: mol_type = other RNA
ctgggggatctggggtcgttttttcc

SEQ ID NO: 4694 - RNA, 26 nt, synthetic construct
  source 1..26: mol_type = other RNA
tgggggatctggggtcgttttttcct

SEQ ID NO: 4695 - RNA, 26 nt, synthetic construct
  source 1..26: mol_type = other RNA
gggggatctggggtcgttttttcctc

SEQ ID NO: 4696 - RNA, 26 nt, synthetic construct
  source 1..26: mol_type = other RNA
ggggatctggggtcgttttttcctca

SEQ ID NO: 4697 - RNA, 26 nt, synthetic construct
  source 1..26: mol_type = other RNA
gggatctggggtcgttttttcctcaa

SEQ ID NO: 4698 - RNA, 26 nt, synthetic construct
  source 1..26: mol_type = other RNA
ggatctggggtcgttttttcctcaaa

SEQ ID NO: 4699 - RNA, 26 nt, synthetic construct
  source 1..26: mol_type = other RNA
gatctggggtcgttttttcctcaaat

SEQ ID NO: 4700 - RNA, 26 nt, synthetic construct
  source 1..26: mol_type = other RNA
atctggggtcgttttttcctcaaatc

SEQ ID NO: 4701 - RNA, 26 nt, synthetic construct
  source 1..26: mol_type = other RNA
tctggggtcgttttttcctcaaatca

SEQ ID NO: 4702 - RNA, 26 nt, synthetic construct
  source 1..26: mol_type = other RNA
ctggggtcgttttttcctcaaatcag

SEQ ID NO: 4703 - RNA, 26 nt, synthetic construct
  source 1..26: mol_type = other RNA
tggggtcgttttttcctcaaatcagg

SEQ ID NO: 4704 - RNA, 26 nt, synthetic construct
  source 1..26: mol_type = other RNA
ggggtcgttttttcctcaaatcagga

SEQ ID NO: 4705 - RNA, 26 nt, synthetic construct
  source 1..26: mol_type = other RNA
gggtcgttttttcctcaaatcaggag

SEQ ID NO: 4706 - RNA, 26 nt, synthetic construct
  source 1..26: mol_type = other RNA
ggtcgttttttcctcaaatcaggagt

SEQ ID NO: 4707 - RNA, 26 nt, synthetic construct
  source 1..26: mol_type = other RNA
gtcgttttttcctcaaatcaggagtc

SEQ ID NO: 4708 - RNA, 26 nt, synthetic construct
  source 1..26: mol_type = other RNA
tcgttttttcctcaaatcaggagtct

SEQ ID NO: 4709 - RNA, 26 nt, synthetic construct
  source 1..26: mol_type = other RNA
cgttttttcctcaaatcaggagtctc

SEQ ID NO: 4710 - RNA, 26 nt, synthetic construct
  source 1..26: mol_type = other RNA
gttttttcctcaaatcaggagtctct

SEQ ID NO: 4711 - RNA, 26 nt, synthetic construct
  source 1..26: mol_type = other RNA
ttttttcctcaaatcaggagtctctt

SEQ ID NO: 4712 - RNA, 26 nt, synthetic construct
  source 1..26: mol_type = other RNA
tttttcctcaaatcaggagtctcttt

SEQ ID NO: 4713 - RNA, 26 nt, synthetic construct
  source 1..26: mol_type = other RNA
ttttcctcaaatcaggagtctctttt

SEQ ID NO: 4714 - RNA, 26 nt, synthetic construct
  source 1..26: mol_type = other RNA
tttcctcaaatcaggagtctcttttc

SEQ ID NO: 4715 - RNA, 26 nt, synthetic construct
  source 1..26: mol_type = other RNA
ttcctcaaatcaggagtctcttttcc

SEQ ID NO: 4716 - RNA, 26 nt, synthetic construct
  source 1..26: mol_type = other RNA
tcctcaaatcaggagtctcttttcct

SEQ ID NO: 4717 - RNA, 26 nt, synthetic construct
  source 1..26: mol_type = other RNA
cctcaaatcaggagtctcttttcctc

SEQ ID NO: 4718 - RNA, 26 nt, synthetic construct
  source 1..26: mol_type = other RNA
ctcaaatcaggagtctcttttcctct

SEQ ID NO: 4719 - RNA, 26 nt, synthetic construct
  source 1..26: mol_type = other RNA
tcaaatcaggagtctcttttcctcta

SEQ ID NO: 4720 - RNA, 26 nt, synthetic construct
  source 1..26: mol_type = other RNA
caaatcaggagtctcttttcctctag

SEQ ID NO: 4721 - RNA, 26 nt, synthetic construct
  source 1..26: mol_type = other RNA
aaatcaggagtctcttttcctctaga

SEQ ID NO: 4722 - RNA, 26 nt, synthetic construct
  source 1..26: mol_type = other RNA
aatcaggagtctcttttcctctagat

SEQ ID NO: 4723 - RNA, 26 nt, synthetic construct
  source 1..26: mol_type = other RNA
atcaggagtctcttttcctctagatt

SEQ ID NO: 4724 - RNA, 26 nt, synthetic construct
  source 1..26: mol_type = other RNA
tcaggagtctcttttcctctagattt

SEQ ID NO: 4725 - RNA, 26 nt, synthetic construct
  source 1..26: mol_type = other RNA
caggagtctcttttcctctagatttt

SEQ ID NO: 4726 - RNA, 26 nt, synthetic construct
  source 1..26: mol_type = other RNA
aggagtctcttttcctctagattttg

SEQ ID NO: 4727 - RNA, 26 nt, synthetic construct
  source 1..26: mol_type = other RNA
ggagtctcttttcctctagattttgg

SEQ ID NO: 4728 - RNA, 26 nt, synthetic construct
  source 1..26: mol_type = other RNA
gagtctcttttcctctagattttggc

SEQ ID NO: 4729 - RNA, 26 nt, synthetic construct
  source 1..26: mol_type = other RNA
agtctcttttcctctagattttggcc

SEQ ID NO: 4730 - RNA, 26 nt, synthetic construct
  source 1..26: mol_type = other RNA
gtctcttttcctctagattttggccc

SEQ ID NO: 4731 - RNA, 26 nt, synthetic construct
  source 1..26: mol_type = other RNA
tctcttttcctctagattttggccct

SEQ ID NO: 4732 - RNA, 26 nt, synthetic construct
  source 1..26: mol_type = other RNA
ctcttttcctctagattttggccctg

SEQ ID NO: 4733 - RNA, 26 nt, synthetic construct
  source 1..26: mol_type = other RNA
tcttttcctctagattttggccctgt

SEQ ID NO: 4734 - RNA, 26 nt, synthetic construct
  source 1..26: mol_type = other RNA
cttttcctctagattttggccctgtg

SEQ ID NO: 4735 - RNA, 26 nt, synthetic construct
  source 1..26: mol_type = other RNA
ttttcctctagattttggccctgtgt

SEQ ID NO: 4736 - RNA, 26 nt, synthetic construct
  source 1..26: mol_type = other RNA
tttcctctagattttggccctgtgtc

SEQ ID NO: 4737 - RNA, 26 nt, synthetic construct
  source 1..26: mol_type = other RNA
ttcctctagattttggccctgtgtct

SEQ ID NO: 4738 - RNA, 26 nt, synthetic construct
  source 1..26: mol_type = other RNA
tcctctagattttggccctgtgtctc

SEQ ID NO: 4739 - RNA, 26 nt, synthetic construct
  source 1..26: mol_type = other RNA
cctctagattttggccctgtgtctca

SEQ ID NO: 4740 - RNA, 26 nt, synthetic construct
  source 1..26: mol_type = other RNA
ctctagattttggccctgtgtctcaa

SEQ ID NO: 4741 - RNA, 26 nt, synthetic construct
  source 1..26: mol_type = other RNA
tctagattttggccctgtgtctcaaa

SEQ ID NO: 4742 - RNA, 26 nt, synthetic construct
  source 1..26: mol_type = other RNA
ctagattttggccctgtgtctcaaat

SEQ ID NO: 4743 - RNA, 26 nt, synthetic construct
  source 1..26: mol_type = other RNA
tagattttggccctgtgtctcaaatt

SEQ ID NO: 4744 - RNA, 26 nt, synthetic construct
  source 1..26: mol_type = other RNA
agattttggccctgtgtctcaaatta

SEQ ID NO: 4745 - RNA, 26 nt, synthetic construct
  source 1..26: mol_type = other RNA
gattttggccctgtgtctcaaattac

SEQ ID NO: 4746 - RNA, 26 nt, synthetic construct
  source 1..26: mol_type = other RNA
attttggccctgtgtctcaaattacc

SEQ ID NO: 4747 - RNA, 26 nt, synthetic construct
  source 1..26: mol_type = other RNA
ttttggccctgtgtctcaaattaccc

SEQ ID NO: 4748 - RNA, 26 nt, synthetic construct
  source 1..26: mol_type = other RNA
tttggccctgtgtctcaaattacccc

SEQ ID NO: 4749 - RNA, 26 nt, synthetic construct
  source 1..26: mol_type = other RNA
ttggccctgtgtctcaaattacccca

SEQ ID NO: 4750 - RNA, 26 nt, synthetic construct
  source 1..26: mol_type = other RNA
tggccctgtgtctcaaattaccccac

SEQ ID NO: 4751 - RNA, 26 nt, synthetic construct
  source 1..26: mol_type = other RNA
ggccctgtgtctcaaattaccccaca

SEQ ID NO: 4752 - RNA, 26 nt, synthetic construct
  source 1..26: mol_type = other RNA
gccctgtgtctcaaattaccccacag

SEQ ID NO: 4753 - RNA, 26 nt, synthetic construct
  source 1..26: mol_type = other RNA
ccctgtgtctcaaattaccccacagt

SEQ ID NO: 4754 - RNA, 26 nt, synthetic construct
  source 1..26: mol_type = other RNA
cctgtgtctcaaattaccccacagtg

SEQ ID NO: 4755 - RNA, 26 nt, synthetic construct
  source 1..26: mol_type = other RNA
ctgtgtctcaaattaccccacagtgg

SEQ ID NO: 4756 - RNA, 26 nt, synthetic construct
  source 1..26: mol_type = other RNA
tgtgtctcaaattaccccacagtggg

SEQ ID NO: 4757 - RNA, 26 nt, synthetic construct
  source 1..26: mol_type = other RNA
gtgtctcaaattaccccacagtgggg

SEQ ID NO: 4758 - RNA, 26 nt, synthetic construct
  source 1..26: mol_type = other RNA
tgtctcaaattaccccacagtggggg

SEQ ID NO: 4759 - RNA, 26 nt, synthetic construct
  source 1..26: mol_type = other RNA
gtctcaaattaccccacagtgggggg

SEQ ID NO: 4760 - RNA, 26 nt, synthetic construct
  source 1..26: mol_type = other RNA
tctcaaattaccccacagtggggggt

SEQ ID NO: 4761 - RNA, 26 nt, synthetic construct
  source 1..26: mol_type = other RNA
ctcaaattaccccacagtggggggtg

SEQ ID NO: 4762 - RNA, 26 nt, synthetic construct
  source 1..26: mol_type = other RNA
tcaaattaccccacagtggggggtgg

SEQ ID NO: 4763 - RNA, 26 nt, synthetic construct
  source 1..26: mol_type = other RNA
caaattaccccacagtggggggtggt

SEQ ID NO: 4764 - RNA, 26 nt, synthetic construct
  source 1..26: mol_type = other RNA
aaattaccccacagtggggggtggtg

SEQ ID NO: 4765 - RNA, 26 nt, synthetic construct
  source 1..26: mol_type = other RNA
aattaccccacagtggggggtggtga

SEQ ID NO: 4766 - RNA, 26 nt, synthetic construct
  source 1..26: mol_type = other RNA
attaccccacagtggggggtggtgaa

SEQ ID NO: 4767 - RNA, 26 nt, synthetic construct
  source 1..26: mol_type = other RNA
ttaccccacagtggggggtggtgaag

SEQ ID NO: 4768 - RNA, 26 nt, synthetic construct
  source 1..26: mol_type = other RNA
taccccacagtggggggtggtgaagt

SEQ ID NO: 4769 - RNA, 26 nt, synthetic construct
  source 1..26: mol_type = other RNA
accccacagtggggggtggtgaagta

SEQ ID NO: 4770 - RNA, 26 nt, synthetic construct
  source 1..26: mol_type = other RNA
ccccacagtggggggtggtgaagtat

SEQ ID NO: 4771 - RNA, 26 nt, synthetic construct
  source 1..26: mol_type = other RNA
cccacagtggggggtggtgaagtatc

SEQ ID NO: 4772 - RNA, 26 nt, synthetic construct
  source 1..26: mol_type = other RNA
ccacagtggggggtggtgaagtatct

SEQ ID NO: 4773 - RNA, 26 nt, synthetic construct
  source 1..26: mol_type = other RNA
cacagtggggggtggtgaagtatctt

SEQ ID NO: 4774 - RNA, 26 nt, synthetic construct
  source 1..26: mol_type = other RNA
acagtggggggtggtgaagtatcttt

SEQ ID NO: 4775 - RNA, 26 nt, synthetic construct
  source 1..26: mol_type = other RNA
cagtggggggtggtgaagtatctttc

SEQ ID NO: 4776 - RNA, 26 nt, synthetic construct
  source 1..26: mol_type = other RNA
agtggggggtggtgaagtatctttct

SEQ ID NO: 4777 - RNA, 26 nt, synthetic construct
  source 1..26: mol_type = other RNA
gtggggggtggtgaagtatctttctc

SEQ ID NO: 4778 - RNA, 26 nt, synthetic construct
  source 1..26: mol_type = other RNA
tggggggtggtgaagtatctttctct

SEQ ID NO: 4779 - RNA, 26 nt, synthetic construct
  source 1..26: mol_type = other RNA
ggggggtggtgaagtatctttctctg

SEQ ID NO: 4780 - RNA, 26 nt, synthetic construct
  source 1..26: mol_type = other RNA
gggggtggtgaagtatctttctctgt

SEQ ID NO: 4781 - RNA, 26 nt, synthetic construct
  source 1..26: mol_type = other RNA
ggggtggtgaagtatctttctctgtg

SEQ ID NO: 4782 - RNA, 26 nt, synthetic construct
  source 1..26: mol_type = other RNA
gggtggtgaagtatctttctctgtgg

SEQ ID NO: 4783 - RNA, 26 nt, synthetic construct
  source 1..26: mol_type = other RNA
ggtggtgaagtatctttctctgtggg

SEQ ID NO: 4784 - RNA, 26 nt, synthetic construct
  source 1..26: mol_type = other RNA
gtggtgaagtatctttctctgtgggt

SEQ ID NO: 4785 - RNA, 26 nt, synthetic construct
  source 1..26: mol_type = other RNA
tggtgaagtatctttctctgtgggtc

SEQ ID NO: 4786 - RNA, 26 nt, synthetic construct
  source 1..26: mol_type = other RNA
ggtgaagtatctttctctgtgggtct

SEQ ID NO: 4787 - RNA, 26 nt, synthetic construct
  source 1..26: mol_type = other RNA
gtgaagtatctttctctgtgggtcta

SEQ ID NO: 4788 - RNA, 26 nt, synthetic construct
  source 1..26: mol_type = other RNA
tgaagtatctttctctgtgggtctag

SEQ ID NO: 4789 - RNA, 26 nt, synthetic construct
  source 1..26: mol_type = other RNA
gaagtatctttctctgtgggtctagg

SEQ ID NO: 4790 - RNA, 26 nt, synthetic construct
  source 1..26: mol_type = other RNA
aagtatctttctctgtgggtctaggg

SEQ ID NO: 4791 - RNA, 26 nt, synthetic construct
  source 1..26: mol_type = other RNA
agtatctttctctgtgggtctagggt

SEQ ID NO: 4792 - RNA, 26 nt, synthetic construct
  source 1..26: mol_type = other RNA
gtatctttctctgtgggtctagggtc

SEQ ID NO: 4793 - RNA, 26 nt, synthetic construct
  source 1..26: mol_type = other RNA
tatctttctctgtgggtctagggtct

SEQ ID NO: 4794 - RNA, 26 nt, synthetic construct
  source 1..26: mol_type = other RNA
atctttctctgtgggtctagggtctc

SEQ ID NO: 4795 - RNA, 26 nt, synthetic construct
  source 1..26: mol_type = other RNA
tctttctctgtgggtctagggtctct

SEQ ID NO: 4796 - RNA, 26 nt, synthetic construct
  source 1..26: mol_type = other RNA
ctttctctgtgggtctagggtctctc

SEQ ID NO: 4797 - RNA, 26 nt, synthetic construct
  source 1..26: mol_type = other RNA
tttctctgtgggtctagggtctctct

SEQ ID NO: 4798 - RNA, 26 nt, synthetic construct
  source 1..26: mol_type = other RNA
ttctctgtgggtctagggtctctctg

SEQ ID NO: 4799 - RNA, 26 nt, synthetic construct
  source 1..26: mol_type = other RNA
tctctgtgggtctagggtctctctgt

SEQ ID NO: 4800 - RNA, 26 nt, synthetic construct
  source 1..26: mol_type = other RNA
ctctgtgggtctagggtctctctgtc

SEQ ID NO: 4801 - RNA, 26 nt, synthetic construct
  source 1..26: mol_type = other RNA
tctgtgggtctagggtctctctgtct

SEQ ID NO: 4802 - RNA, 26 nt, synthetic construct
  source 1..26: mol_type = other RNA
ctgtgggtctagggtctctctgtctc

SEQ ID NO: 4803 - RNA, 26 nt, synthetic construct
  source 1..26: mol_type = other RNA
tgtgggtctagggtctctctgtctca

SEQ ID NO: 4804 - RNA, 26 nt, synthetic construct
  source 1..26: mol_type = other RNA
gtgggtctagggtctctctgtctcag

SEQ ID NO: 4805 - RNA, 26 nt, synthetic construct
  source 1..26: mol_type = other RNA
tgggtctagggtctctctgtctcagg

SEQ ID NO: 4806 - RNA, 26 nt, synthetic construct
  source 1..26: mol_type = other RNA
gggtctagggtctctctgtctcaggg

SEQ ID NO: 4807 - RNA, 26 nt, synthetic construct
  source 1..26: mol_type = other RNA
ggtctagggtctctctgtctcagggt

SEQ ID NO: 4808 - RNA, 26 nt, synthetic construct
  source 1..26: mol_type = other RNA
gtctagggtctctctgtctcagggtc

SEQ ID NO: 4809 - RNA, 26 nt, synthetic construct
  source 1..26: mol_type = other RNA
tctagggtctctctgtctcagggtct

SEQ ID NO: 4810 - RNA, 26 nt, synthetic construct
  source 1..26: mol_type = other RNA
ctagggtctctctgtctcagggtctg

SEQ ID NO: 4811 - RNA, 26 nt, synthetic construct
  source 1..26: mol_type = other RNA
tagggtctctctgtctcagggtctgg

SEQ ID NO: 4812 - RNA, 26 nt, synthetic construct
  source 1..26: mol_type = other RNA
agggtctctctgtctcagggtctggg

SEQ ID NO: 4813 - RNA, 26 nt, synthetic construct
  source 1..26: mol_type = other RNA
gggtctctctgtctcagggtctgggg

SEQ ID NO: 4814 - RNA, 26 nt, synthetic construct
  source 1..26: mol_type = other RNA
ggtctctctgtctcagggtctggggt

SEQ ID NO: 4815 - RNA, 26 nt, synthetic construct
  source 1..26: mol_type = other RNA
gtctctctgtctcagggtctggggtc

SEQ ID NO: 4816 - RNA, 26 nt, synthetic construct
  source 1..26: mol_type = other RNA
tctctctgtctcagggtctggggtct

SEQ ID NO: 4817 - RNA, 26 nt, synthetic construct
  source 1..26: mol_type = other RNA
ctctctgtctcagggtctggggtctg

SEQ ID NO: 4818 - RNA, 26 nt, synthetic construct
  source 1..26: mol_type = other RNA
tctctgtctcagggtctggggtctgc

SEQ ID NO: 4819 - RNA, 26 nt, synthetic construct
  source 1..26: mol_type = other RNA
ctctgtctcagggtctggggtctgca

SEQ ID NO: 4820 - RNA, 26 nt, synthetic construct
  source 1..26: mol_type = other RNA
tctgtctcagggtctggggtctgcat

SEQ ID NO: 4821 - RNA, 26 nt, synthetic construct
  source 1..26: mol_type = other RNA
ctgtctcagggtctggggtctgcatc

SEQ ID NO: 4822 - RNA, 26 nt, synthetic construct
  source 1..26: mol_type = other RNA
tgtctcagggtctggggtctgcatct

SEQ ID NO: 4823 - RNA, 26 nt, synthetic construct
  source 1..26: mol_type = other RNA
gtctcagggtctggggtctgcatctt

SEQ ID NO: 4824 - RNA, 26 nt, synthetic construct
  source 1..26: mol_type = other RNA
tctcagggtctggggtctgcatcttt

SEQ ID NO: 4825 - RNA, 26 nt, synthetic construct
  source 1..26: mol_type = other RNA
ctcagggtctggggtctgcatcttta

SEQ ID NO: 4826 - RNA, 26 nt, synthetic construct
  source 1..26: mol_type = other RNA
tcagggtctggggtctgcatctttag

SEQ ID NO: 4827 - RNA, 26 nt, synthetic construct
  source 1..26: mol_type = other RNA
cagggtctggggtctgcatctttagg

SEQ ID NO: 4828 - RNA, 26 nt, synthetic construct
  source 1..26: mol_type = other RNA
agggtctggggtctgcatctttagga

SEQ ID NO: 4829 - RNA, 26 nt, synthetic construct
  source 1..26: mol_type = other RNA
gggtctggggtctgcatctttaggac

SEQ ID NO: 4830 - RNA, 26 nt, synthetic construct
  source 1..26: mol_type = other RNA
ggtctggggtctgcatctttaggacc

SEQ ID NO: 4831 - RNA, 26 nt, synthetic construct
  source 1..26: mol_type = other RNA
gtctggggtctgcatctttaggacct

SEQ ID NO: 4832 - RNA, 26 nt, synthetic construct
  source 1..26: mol_type = other RNA
tctggggtctgcatctttaggacctc

SEQ ID NO: 4833 - RNA, 26 nt, synthetic construct
  source 1..26: mol_type = other RNA
ctggggtctgcatctttaggacctct

SEQ ID NO: 4834 - RNA, 26 nt, synthetic construct
  source 1..26: mol_type = other RNA
tggggtctgcatctttaggacctctg

SEQ ID NO: 4835 - RNA, 26 nt, synthetic construct
  source 1..26: mol_type = other RNA
ggggtctgcatctttaggacctctgt

SEQ ID NO: 4836 - RNA, 26 nt, synthetic construct
  source 1..26: mol_type = other RNA
gggtctgcatctttaggacctctgtc

SEQ ID NO: 4837 - RNA, 26 nt, synthetic construct
  source 1..26: mol_type = other RNA
ggtctgcatctttaggacctctgtct

SEQ ID NO: 4838 - RNA, 26 nt, synthetic construct
  source 1..26: mol_type = other RNA
gtctgcatctttaggacctctgtctc

SEQ ID NO: 4839 - RNA, 26 nt, synthetic construct
  source 1..26: mol_type = other RNA
tctgcatctttaggacctctgtctct

SEQ ID NO: 4840 - RNA, 26 nt, synthetic construct
  source 1..26: mol_type = other RNA
ctgcatctttaggacctctgtctctc

SEQ ID NO: 4841 - RNA, 26 nt, synthetic construct
  source 1..26: mol_type = other RNA
tgcatctttaggacctctgtctctct

SEQ ID NO: 4842 - RNA, 26 nt, synthetic construct
  source 1..26: mol_type = other RNA
gcatctttaggacctctgtctctctc

SEQ ID NO: 4843 - RNA, 26 nt, synthetic construct
  source 1..26: mol_type = other RNA
catctttaggacctctgtctctctct

SEQ ID NO: 4844 - RNA, 26 nt, synthetic construct
  source 1..26: mol_type = other RNA
atctttaggacctctgtctctctctg

SEQ ID NO: 4845 - RNA, 26 nt, synthetic construct
  source 1..26: mol_type = other RNA
tctttaggacctctgtctctctctgg

SEQ ID NO: 4846 - RNA, 26 nt, synthetic construct
  source 1..26: mol_type = other RNA
ctttaggacctctgtctctctctggt

SEQ ID NO: 4847 - RNA, 26 nt, synthetic construct
  source 1..26: mol_type = other RNA
tttaggacctctgtctctctctggtg

SEQ ID NO: 4848 - RNA, 26 nt, synthetic construct
  source 1..26: mol_type = other RNA
ttaggacctctgtctctctctggtgt

SEQ ID NO: 4849 - RNA, 26 nt, synthetic construct
  source 1..26: mol_type = other RNA
taggacctctgtctctctctggtgtg

SEQ ID NO: 4850 - RNA, 26 nt, synthetic construct
  source 1..26: mol_type = other RNA
aggacctctgtctctctctggtgtgt

SEQ ID NO: 4851 - RNA, 26 nt, synthetic construct
  source 1..26: mol_type = other RNA
ggacctctgtctctctctggtgtgtt

SEQ ID NO: 4852 - RNA, 26 nt, synthetic construct
  source 1..26: mol_type = other RNA
gacctctgtctctctctggtgtgttt

SEQ ID NO: 4853 - RNA, 20 nt, synthetic construct
  source 1..20: mol_type = other RNA
  modified_base 1..20: mod_base = OTHER; note = Phosphorothioate linkage
  modified_base 1..20: mod_base = OTHER; note = 2'-O-(2-methoxyethyl) ribonucleotide
  modified_base 2: mod_base = OTHER; note = 5-methyl cytidine
  modified_base 5: mod_base = OTHER; note = 5-methyl cytidine
  modified_base 8: mod_base = OTHER; note = 5-methyl cytidine
  modified_base 11: mod_base = OTHER; note = 5-methyl cytidine
  modified_base 13..16: mod_base = OTHER; note = 5-methyl cytidine
acttcagcagctccccggga

SEQ ID NO: 4854 - RNA, 20 nt, synthetic construct
  source 1..20: mol_type = other RNA
  modified_base 1..20: mod_base = OTHER; note = Phosphorothioate linkage
  modified_base 1..20: mod_base = OTHER; note = 2'-O-(2-methoxyethyl) ribonucleotide
  modified_base 3..4: mod_base = OTHER; note = 5-methyl cytidine
  modified_base 6: mod_base = OTHER; note = 5-methyl cytidine
  modified_base 8: mod_base = OTHER; note = 5-methyl cytidine
  modified_base 12..13: mod_base = OTHER; note = 5-methyl cytidine
  modified_base 15: mod_base = OTHER; note = 5-methyl cytidine
  modified_base 18: mod_base = OTHER; note = 5-methyl cytidine
tgcctctcggtcctctgcag

SEQ ID NO: 4855 - DNA, 20 bp, synthetic construct
  source 1..20: mol_type = other DNA
  modified_base 1..20: mod_base = OTHER; note = Phosphorothioate linkage
  modified_base 1..5: mod_base = OTHER; note = 2'-O-(2-methoxyethyl) ribonucleotide
  misc_feature 1..5: note = RNA
  misc_feature 6..15: note = DNA
  misc_feature 16..20: note = RNA
  modified_base 16..20: mod_base = OTHER; note = 2'-O-(2-methoxyethyl) ribonucleotide
  modified_base 1: mod_base = OTHER; note = 5-methyl cytidine
  modified_base 16: mod_base = OTHER; note = 5-methyl cytidine
ctggaagagtatgagcggag

SEQ ID NO: 4856 - DNA, 20 bp, synthetic construct
  source 1..20: mol_type = other DNA
  modified_base 1..20: mod_base = OTHER; note = Phosphorothioate linkage
  modified_base 1..5: mod_base = OTHER; note = 2'-O-(2-methoxyethyl) ribonucleotide
  misc_feature 1..5: note = RNA
  misc_feature 6..15: note = DNA
  misc_feature 16..20: note = RNA
  modified_base 16..20: mod_base = OTHER; note = 2'-O-(2-methoxyethyl) ribonucleotide
  modified_base 1: mod_base = OTHER; note = 5-methyl cytidine
  modified_base 7: mod_base = OTHER; note = 5-methyl cytidine
cggaagctggaagagtatga

SEQ ID NO: 4857 - DNA, 20 bp, synthetic construct
  source 1..20: mol_type = other DNA
  modified_base 1..20: mod_base = OTHER; note = Phosphorothioate linkage
  modified_base 1..5: mod_base = OTHER; note = 2'-O-(2-methoxyethyl) ribonucleotide
  misc_feature 1..5: note = RNA
  misc_feature 6..15: note = DNA
  misc_feature 16..20: note = RNA
  modified_base 16..20: mod_base = OTHER; note = 2'-O-(2-methoxyethyl) ribonucleotide
  modified_base 2..3: mod_base = OTHER; note = 5-methyl cytidine
  modified_base 6..7: mod_base = OTHER; note = 5-methyl cytidine
  modified_base 13: mod_base = OTHER; note = 5-methyl cytidine
tccaaccggaagctggaaga

SEQ ID NO: 4858 - DNA, 20 bp, synthetic construct
  source 1..20: mol_type = other DNA
  modified_base 1..20: mod_base = OTHER; note = Phosphorothioate linkage
  modified_base 1..5: mod_base = OTHER; note = 2'-O-(2-methoxyethyl) ribonucleotide
  misc_feature 1..5: note = RNA
  misc_feature 6..15: note = DNA
  misc_feature 16..20: note = RNA
  modified_base 16..20: mod_base = OTHER; note = 2'-O-(2-methoxyethyl) ribonucleotide
  modified_base 3: mod_base = OTHER; note = 5-methyl cytidine
  modified_base 6: mod_base = OTHER; note = 5-methyl cytidine
  modified_base 8: mod_base = OTHER; note = 5-methyl cytidine
  modified_base 13..14: mod_base = OTHER; note = 5-methyl cytidine
  modified_base 17..18: mod_base = OTHER; note = 5-methyl cytidine
ggctgcacatgtccaaccgg

SEQ ID NO: 4859 - RNA, 20 nt, synthetic construct
  source 1..20: mol_type = other RNA
  modified_base 1..20: mod_base = OTHER; note = Phosphorothioate linkage
  modified_base 1..20: mod_base = OTHER; note = 2'-O-(2-methoxyethyl) ribonucleotide
  modified_base 2: mod_base = OTHER; note = 5-methyl cytidine
  modified_base 5: mod_base = OTHER; note = 5-methyl cytidine
  modified_base 9: mod_base = OTHER; note = 5-methyl cytidine
gcagcaggcagagaaggatt

SEQ ID NO: 4860 - RNA, 20 nt, synthetic construct
  source 1..20: mol_type = other RNA
  modified_base 1..20: mod_base = OTHER; note = Phosphorothioate linkage
  modified_base 1..20: mod_base = OTHER; note = 2'-O-(2-methoxyethyl) ribonucleotide
  modified_base 3..5: mod_base = OTHER; note = 5-methyl cytidine
  modified_base 14: mod_base = OTHER; note = 5-methyl cytidine
  modified_base 18..19: mod_base = OTHER; note = 5-methyl cytidine
gtcccaggaagaacaaacca

SEQ ID NO: 4861 - RNA, 20 nt, synthetic construct
  source 1..20: mol_type = other RNA
  modified_base 1..20: mod_base = OTHER; note = Phosphorothioate linkage
  modified_base 1..20: mod_base = OTHER; note = 2'-O-(2-methoxyethyl) ribonucleotide
  modified_base 2: mod_base = OTHER; note = 5-methyl cytidine
  modified_base 5: mod_base = OTHER; note = 5-methyl cytidine
  modified_base 9..11: mod_base = OTHER; note = 5-methyl cytidine
  modified_base 20: mod_base = OTHER; note = 5-methyl cytidine
gctgctgtcccaggaagaac

SEQ ID NO: 4862 - RNA, 20 nt, synthetic construct
  source 1..20: mol_type = other RNA
  modified_base 1..20: mod_base = OTHER; note = Phosphorothioate linkage
  modified_base 1..20: mod_base = OTHER; note = 2'-O-(2-methoxyethyl) ribonucleotide
  modified_base 1: mod_base = OTHER; note = 5-methyl cytidine
  modified_base 16: mod_base = OTHER; note = 5-methyl cytidine
ctggaagagtatgagcggag

SEQ ID NO: 4863 - RNA, 20 nt, synthetic construct
  source 1..20: mol_type = other RNA
  modified_base 1..20: mod_base = OTHER; note = Phosphorothioate linkage
  modified_base 1..20: mod_base = OTHER; note = 2'-O-(2-methoxyethyl) ribonucleotide
  modified_base 1: mod_base = OTHER; note = 5-methyl cytidine
  modified_base 7: mod_base = OTHER; note = 5-methyl cytidine
cggaagctggaagagtatga

SEQ ID NO: 4864 - RNA, 20 nt, synthetic construct
  source 1..20: mol_type = other RNA
  modified_base 1..20: mod_base = OTHER; note = Phosphorothioate linkage
  modified_base 1..20: mod_base = OTHER; note = 2'-O-(2-methoxyethyl) ribonucleotide
  modified_base 2..3: mod_base = OTHER; note = 5-methyl cytidine
  modified_base 6..7: mod_base = OTHER; note = 5-methyl cytidine
  modified_base 13: mod_base = OTHER; note = 5-methyl cytidine
tccaaccggaagctggaaga

SEQ ID NO: 4865 - RNA, 20 nt, synthetic construct
  source 1..20: mol_type = other RNA
  modified_base 1..20: mod_base = OTHER; note = Phosphorothioate linkage
  modified_base 1..20: mod_base = OTHER; note = 2'-O-(2-methoxyethyl) ribonucleotide
  modified_base 3: mod_base = OTHER; note = 5-methyl cytidine
  modified_base 6: mod_base = OTHER; note = 5-methyl cytidine
  modified_base 8: mod_base = OTHER; note = 5-methyl cytidine
  modified_base 13..14: mod_base = OTHER; note = 5-methyl cytidine
  modified_base 17..18: mod_base = OTHER; note = 5-methyl cytidine
ggctgcacatgtccaaccgg

SEQ ID NO: 4866 - DNA, 20 bp, synthetic construct
  source 1..20: mol_type = other DNA
  modified_base 1..20: mod_base = OTHER; note = Phosphorothioate linkage
  modified_base 1..5: mod_base = OTHER; note = 2'-O-(2-methoxyethyl) ribonucleotide
  misc_feature 1..5: note = RNA
  misc_feature 6..15: note = DNA
  misc_feature 16..20: note = RNA
  modified_base 16..20: mod_base = OTHER; note = 2'-O-(2-methoxyethyl) ribonucleotide
  modified_base 12..13: mod_base = OTHER; note = 5-methyl cytidine
  modified_base 18: mod_base = OTHER; note = 5-methyl cytidine
ggaatgagataccatggctg

SEQ ID NO: 4867 - DNA, 20 bp, synthetic construct
  source 1..20: mol_type = other DNA
  modified_base 1..20: mod_base = OTHER; note = Phosphorothioate linkage
  modified_base 1..5: mod_base = OTHER; note = 2'-O-(2-methoxyethyl) ribonucleotide
  misc_feature 1..5: note = RNA
  misc_feature 6..15: note = DNA
  misc_feature 16..20: note = RNA
  modified_base 16..20: mod_base = OTHER; note = 2'-O-(2-methoxyethyl) ribonucleotide
  modified_base 2: mod_base = OTHER; note = 5-methyl cytidine
  modified_base 10..11: mod_base = OTHER; note = 5-methyl cytidine
  modified_base 13: mod_base = OTHER; note = 5-methyl cytidine
tcagtatggcctcttttttt

SEQ ID NO: 4868 - DNA, 20 bp, synthetic construct
  source 1..20: mol_type = other DNA
  modified_base 1..20: mod_base = OTHER; note = Phosphorothioate linkage
  modified_base 1..5: mod_base = OTHER; note = 2'-O-(2-methoxyethyl) ribonucleotide
  misc_feature 1..5: note = RNA
  misc_feature 6..15: note = DNA
  misc_feature 16..20: note = RNA
  modified_base 16..20: mod_base = OTHER; note = 2'-O-(2-methoxyethyl) ribonucleotide
  modified_base 2: mod_base = OTHER; note = 5-methyl cytidine
  modified_base 8: mod_base = OTHER; note = 5-methyl cytidine
  modified_base 16..17: mod_base = OTHER; note = 5-methyl cytidine
  modified_base 19: mod_base = OTHER; note = 5-methyl cytidine
tctaattcagtatggcctct

SEQ ID NO: 4869 - DNA, 20 bp, synthetic construct
  source 1..20: mol_type = other DNA
  modified_base 1..20: mod_base = OTHER; note = Phosphorothioate linkage
  modified_base 1..5: mod_base = OTHER; note = 2'-O-(2-methoxyethyl) ribonucleotide
  misc_feature 1..5: note = RNA
  misc_feature 6..15: note = DNA
  misc_feature 16..20: note = RNA
  modified_base 16..20: mod_base = OTHER; note = 2'-O-(2-methoxyethyl) ribonucleotide
  modified_base 10..11: mod_base = OTHER; note = 5-methyl cytidine
  modified_base 13: mod_base = OTHER; note = 5-methyl cytidine
  modified_base 15: mod_base = OTHER; note = 5-methyl cytidine
gttaagggtccactctaatt

SEQ ID NO: 4870 - DNA, 20 bp, synthetic construct
  source 1..20: mol_type = other DNA
  modified_base 1..20: mod_base = OTHER; note = Phosphorothioate linkage
  modified_base 1..5: mod_base = OTHER; note = 2'-O-(2-methoxyethyl) ribonucleotide
  misc_feature 1..5: note = RNA
  misc_feature 6..15: note = DNA
  misc_feature 16..20: note = RNA
  modified_base 16..20: mod_base = OTHER; note = 2'-O-(2-methoxyethyl) ribonucleotide
  modified_base 20: mod_base = OTHER; note = 5-methyl cytidine
tataaggtgggttaagggtc

SEQ ID NO: 4871 - DNA, 20 bp, synthetic construct
  source 1..20: mol_type = other DNA
  modified_base 1..20: mod_base = OTHER; note = Phosphorothioate linkage
  modified_base 1..5: mod_base = OTHER; note = 2'-O-(2-methoxyethyl) ribonucleotide
  misc_feature 1..5: note = RNA
  misc_feature 6..15: note = DNA
  misc_feature 16..20: note = RNA
  modified_base 16..20: mod_base = OTHER; note = 2'-O-(2-methoxyethyl) ribonucleotide
  modified_base 3: mod_base = OTHER; note = 5-methyl cytidine
  modified_base 5..6: mod_base = OTHER; note = 5-methyl cytidine
gacaccagtttttataaggt

SEQ ID NO: 4872 - DNA, 20 bp, synthetic construct
  source 1..20: mol_type = other DNA
  modified_base 1..20: mod_base = OTHER; note = Phosphorothioate linkage
  modified_base 1..5: mod_base = OTHER; note = 2'-O-(2-methoxyethyl) ribonucleotide
  misc_feature 1..5: note = RNA
  misc_feature 6..15: note = DNA
  misc_feature 16..20: note = RNA
  modified_base 16..20: mod_base = OTHER; note = 2'-O-(2-methoxyethyl) ribonucleotide
  modified_base 1..2: mod_base = OTHER; note = 5-methyl cytidine
  modified_base 12: mod_base = OTHER; note = 5-methyl cytidine
  modified_base 14..15: mod_base = OTHER; note = 5-methyl cytidine
ccatataaagacaccagttt

SEQ ID NO: 4873 - DNA, 20 bp, synthetic construct
  source 1..20: mol_type = other DNA
  modified_base 1..20: mod_base = OTHER; note = Phosphorothioate linkage
  modified_base 1..5: mod_base = OTHER; note = 2'-O-(2-methoxyethyl) ribonucleotide
  misc_feature 1..5: note = RNA
  misc_feature 6..15: note = DNA
  misc_feature 16..20: note = RNA
  modified_base 16..20: mod_base = OTHER; note = 2'-O-(2-methoxyethyl) ribonucleotide
  modified_base 1: mod_base = OTHER; note = 5-methyl cytidine
  modified_base 3..5: mod_base = OTHER; note = 5-methyl cytidine
  modified_base 7: mod_base = OTHER; note = 5-methyl cytidine
  modified_base 9..10: mod_base = OTHER; note = 5-methyl cytidine
  modified_base 20: mod_base = OTHER; note = 5-methyl cytidine
ctccctctccatataaagac

SEQ ID NO: 4874 - DNA, 20 bp, synthetic construct
  source 1..20: mol_type = other DNA
  modified_base 1..20: mod_base = OTHER; note = Phosphorothioate linkage
  modified_base 1..5: mod_base = OTHER; note = 2'-O-(2-methoxyethyl) ribonucleotide
  misc_feature 1..5: note = RNA
  misc_feature 6..15: note = DNA
  misc_feature 16..20: note = RNA
  modified_base 16..20: mod_base = OTHER; note = 2'-O-(2-methoxyethyl) ribonucleotide
  modified_base 4: mod_base = OTHER; note = 5-methyl cytidine
  modified_base 6: mod_base = OTHER; note = 5-methyl cytidine
  modified_base 12: mod_base = OTHER; note = 5-methyl cytidine
  modified_base 14..15: mod_base = OTHER; note = 5-methyl cytidine
  modified_base 20: mod_base = OTHER; note = 5-methyl cytidine
tatctctgtgtctccaaatc

SEQ ID NO: 4875 - DNA, 20 bp, synthetic construct
  source 1..20: mol_type = other DNA
  modified_base 1..20: mod_base = OTHER; note = Phosphorothioate linkage
  modified_base 1..5: mod_base = OTHER; note = 2'-O-(2-methoxyethyl) ribonucleotide
  misc_feature 1..5: note = RNA
  misc_feature 6..15: note = DNA
  misc_feature 16..20: note = RNA
  modified_base 16..20: mod_base = OTHER; note = 2'-O-(2-methoxyethyl) ribonucleotide
  modified_base 5..6: mod_base = OTHER; note = 5-methyl cytidine
  modified_base 12: mod_base = OTHER; note = 5-methyl cytidine
  modified_base 14: mod_base = OTHER; note = 5-methyl cytidine
  modified_base 20: mod_base = OTHER; note = 5-methyl cytidine
gtatcctgtatctctgtgtc

SEQ ID NO: 4876 - DNA, 20 bp, synthetic construct
  source 1..20: mol_type = other DNA
  modified_base 1..20: mod_base = OTHER; note = Phosphorothioate linkage
  modified_base 1..5: mod_base = OTHER; note = 2'-O-(2-methoxyethyl) ribonucleotide
  misc_feature 1..5: note = RNA
  misc_feature 6..15: note = DNA
  misc_feature 16..20: note = RNA
  modified_base 16..20: mod_base = OTHER; note = 2'-O-(2-methoxyethyl) ribonucleotide
  modified_base 7: mod_base = OTHER; note = 5-methyl cytidine
  modified_base 9: mod_base = OTHER; note = 5-methyl cytidine
  modified_base 15..16: mod_base = OTHER; note = 5-methyl cytidine
gtgtgtctctgtatcctgta

SEQ ID NO: 4877 - DNA, 20 bp, synthetic construct
  source 1..20: mol_type = other DNA
  modified_base 1..20: mod_base = OTHER; note = Phosphorothioate linkage
  modified_base 1..5: mod_base = OTHER; note = 2'-O-(2-methoxyethyl) ribonucleotide
  misc_feature 1..5: note = RNA
  misc_feature 6..15: note = DNA
  misc_feature 16..20: note = RNA
  modified_base 16..20: mod_base = OTHER; note = 2'-O-(2-methoxyethyl) ribonucleotide
  modified_base 5: mod_base = OTHER; note = 5-methyl cytidine
  modified_base 9: mod_base = OTHER; note = 5-methyl cytidine
  modified_base 12..13: mod_base = OTHER; note = 5-methyl cytidine
  modified_base 16: mod_base = OTHER; note = 5-methyl cytidine
gtagctggcttccttctgtg

SEQ ID NO: 4878 - DNA, 20 bp, synthetic construct
  source 1..20: mol_type = other DNA
  modified_base 1..20: mod_base = OTHER; note = Phosphorothioate linkage
  modified_base 1..5: mod_base = OTHER; note = 2'-O-(2-methoxyethyl) ribonucleotide
  misc_feature 1..5: note = RNA
  misc_feature 6..15: note = DNA
  misc_feature 16..20: note = RNA
  modified_base 16..20: mod_base = OTHER; note = 2'-O-(2-methoxyethyl) ribonucleotide
  modified_base 1: mod_base = OTHER; note = 5-methyl cytidine
  modified_base 4: mod_base = OTHER; note = 5-methyl cytidine
  modified_base 11: mod_base = OTHER; note = 5-methyl cytidine
  modified_base 15: mod_base = OTHER; note = 5-methyl cytidine
  modified_base 18..19: mod_base = OTHER; note = 5-methyl cytidine
cttcatgtagctggcttcct

SEQ ID NO: 4879 - DNA, 20 bp, synthetic construct
  source 1..20: mol_type = other DNA
  modified_base 1..20: mod_base = OTHER; note = Phosphorothioate linkage
  modified_base 1..5: mod_base = OTHER; note = 2'-O-(2-methoxyethyl) ribonucleotide
  misc_feature 1..5: note = RNA
  misc_feature 6..15: note = DNA
  misc_feature 16..20: note = RNA
  modified_base 16..20: mod_base = OTHER; note = 2'-O-(2-methoxyethyl) ribonucleotide
  modified_base 1: mod_base = OTHER; note = 5-methyl cytidine
  modified_base 3..4: mod_base = OTHER; note = 5-methyl cytidine
  modified_base 7: mod_base = OTHER; note = 5-methyl cytidine
  modified_base 10: mod_base = OTHER; note = 5-methyl cytidine
  modified_base 17: mod_base = OTHER; note = 5-methyl cytidine
ctccatcttcatgtagctgg

SEQ ID NO: 4880 - DNA, 20 bp, synthetic construct
  source 1..20: mol_type = other DNA
  modified_base 1..20: mod_base = OTHER; note = Phosphorothioate linkage
  modified_base 1..5: mod_base = OTHER; note = 2'-O-(2-methoxyethyl) ribonucleotide
  misc_feature 1..5: note = RNA
  misc_feature 6..15: note = DNA
  misc_feature 16..20: note = RNA
  modified_base 16..20: mod_base = OTHER; note = 2'-O-(2-methoxyethyl) ribonucleotide
  modified_base 2: mod_base = OTHER; note = 5-methyl cytidine
  modified_base 5..6: mod_base = OTHER; note = 5-methyl cytidine
  modified_base 9: mod_base = OTHER; note = 5-methyl cytidine
  modified_base 16: mod_base = OTHER; note = 5-methyl cytidine
  modified_base 19..20: mod_base = OTHER; note = 5-methyl cytidine
gcatccgtctaatttctgcc

SEQ ID NO: 4881 - DNA, 20 bp, synthetic construct
  source 1..20: mol_type = other DNA
  modified_base 1..20: mod_base = OTHER; note = Phosphorothioate linkage
  modified_base 1..5: mod_base = OTHER; note = 2'-O-(2-methoxyethyl) ribonucleotide
  misc_feature 1..5: note = RNA
  misc_feature 6..15: note = DNA
  misc_feature 16..20: note = RNA
  modified_base 16..20: mod_base = OTHER; note = 2'-O-(2-methoxyethyl) ribonucleotide
  modified_base 1: mod_base = OTHER; note = 5-methyl cytidine
  modified_base 8: mod_base = OTHER; note = 5-methyl cytidine
  modified_base 11: mod_base = OTHER; note = 5-methyl cytidine
  modified_base 14..15: mod_base = OTHER; note = 5-methyl cytidine
  modified_base 18: mod_base = OTHER; note = 5-methyl cytidine
cttataactgcatccgtcta

SEQ ID NO: 4882 - DNA, 20 bp, synthetic construct
  source 1..20: mol_type = other DNA
  modified_base 1..20: mod_base = OTHER; note = Phosphorothioate linkage
  modified_base 1..5: mod_base = OTHER; note = 2'-O-(2-methoxyethyl) ribonucleotide
  misc_feature 1..5: note = RNA
  misc_feature 6..15: note = DNA
  misc_feature 16..20: note = RNA
  modified_base 16..20: mod_base = OTHER; note = 2'-O-(2-methoxyethyl) ribonucleotide
  modified_base 2: mod_base = OTHER; note = 5-methyl cytidine
  modified_base 8: mod_base = OTHER; note = 5-methyl cytidine
  modified_base 16..17: mod_base = OTHER; note = 5-methyl cytidine
  modified_base 20: mod_base = OTHER; note = 5-methyl cytidine
gctgtagcagggaatccttc

SEQ ID NO: 4883 - DNA, 20 bp, synthetic construct
  source 1..20: mol_type = other DNA
  modified_base 1..20: mod_base = OTHER; note = Phosphorothioate linkage
  modified_base 1..5: mod_base = OTHER; note = 2'-O-(2-methoxyethyl) ribonucleotide
  misc_feature 1..5: note = RNA
  misc_feature 6..15: note = DNA
  misc_feature 16..20: note = RNA
  modified_base 16..20: mod_base = OTHER; note = 2'-O-(2-methoxyethyl) ribonucleotide
  modified_base 1: mod_base = OTHER; note = 5-methyl cytidine
  modified_base 2..3: mod_base = OTHER; note = 5-methyl cytidine
  modified_base 5: mod_base = OTHER; note = 5-methyl cytidine
  modified_base 7: mod_base = OTHER; note = 5-methyl cytidine
  modified_base 9: mod_base = OTHER; note = 5-methyl cytidine
  modified_base 11: mod_base = OTHER; note = 5-methyl cytidine
  modified_base 19: mod_base = OTHER; note = 5-methyl cytidine
gccacgctctctttgatgct

SEQ ID NO: 4884 - RNA, 20 nt, synthetic construct
  source 1..20: mol_type = other RNA
  modified_base 1..20: mod_base = OTHER; note = Phosphorothioate linkage
  modified_base 1..20: mod_base = OTHER; note = 2'-O-(2-methoxyethyl) ribonucleotide
  modified_base 12..13: mod_base = OTHER; note = 5-methyl cytidine
  modified_base 18: mod_base = OTHER; note = 5-methyl cytidine
ggaatgagataccatggctg

SEQ ID NO: 4885 - RNA, 20 nt, synthetic construct
  source 1..20: mol_type = other RNA
  modified_base 1..20: mod_base = OTHER; note = Phosphorothioate linkage
  modified_base 1..20: mod_base = OTHER; note = 2'-O-(2-methoxyethyl) ribonucleotide
  modified_base 2: mod_base = OTHER; note = 5-methyl cytidine
  modified_base 10..11: mod_base = OTHER; note = 5-methyl cytidine
  modified_base 13: mod_base = OTHER; note = 5-methyl cytidine
tcagtatggcctcttttttt

SEQ ID NO: 4886 - RNA, 20 nt, synthetic construct
  source 1..20: mol_type = other RNA
  modified_base 1..20: mod_base = OTHER; note = Phosphorothioate linkage
  modified_base 1..20: mod_base = OTHER; note = 2'-O-(2-methoxyethyl) ribonucleotide
  modified_base 2: mod_base = OTHER; note = 5-methyl cytidine
  modified_base 8: mod_base = OTHER; note = 5-methyl cytidine
  modified_base 16..17: mod_base = OTHER; note = 5-methyl cytidine
  modified_base 19: mod_base = OTHER; note = 5-methyl cytidine
tctaattcagtatggcctct

SEQ ID NO: 4887 - RNA, 20 nt, synthetic construct
  source 1..20: mol_type = other RNA
  modified_base 1..20: mod_base = OTHER; note = Phosphorothioate linkage
  modified_base 1..20: mod_base = OTHER; note = 2'-O-(2-methoxyethyl) ribonucleotide
  modified_base 10..11: mod_base = OTHER; note = 5-methyl cytidine
  modified_base 13: mod_base = OTHER; note = 5-methyl cytidine
  modified_base 15: mod_base = OTHER; note = 5-methyl cytidine
gttaagggtccactctaatt

SEQ ID NO: 4888 - RNA, 20 nt, synthetic construct
  source 1..20: mol_type = other RNA
  modified_base 1..20: mod_base = OTHER; note = Phosphorothioate linkage
  modified_base 1..20: mod_base = OTHER; note = 2'-O-(2-methoxyethyl) ribonucleotide
  modified_base 20: mod_base = OTHER; note = 5-methyl cytidine
tataaggtgggttaagggtc

SEQ ID NO: 4889 - RNA, 20 nt, synthetic construct
  source 1..20: mol_type = other RNA
  modified_base 1..20: mod_base = OTHER; note = Phosphorothioate linkage
  modified_base 1..20: mod_base = OTHER; note = 2'-O-(2-methoxyethyl) ribonucleotide
  modified_base 3: mod_base = OTHER; note = 5-methyl cytidine
  modified_base 5..6: mod_base = OTHER; note = 5-methyl cytidine
gacaccagtttttataaggt

SEQ ID NO: 4890 - RNA, 20 nt, synthetic construct
  source 1..20: mol_type = other RNA
  modified_base 1..20: mod_base = OTHER; note = Phosphorothioate linkage
  modified_base 1..20: mod_base = OTHER; note = 2'-O-(2-methoxyethyl) ribonucleotide
  modified_base 1..2: mod_base = OTHER; note = 5-methyl cytidine
  modified_base 12: mod_base = OTHER; note = 5-methyl cytidine
  modified_base 14..15: mod_base = OTHER; note = 5-methyl cytidine
ccatataaagacaccagttt

SEQ ID NO: 4891 - RNA, 20 nt, synthetic construct
  source 1..20: mol_type = other RNA
  modified_base 1..20: mod_base = OTHER; note = Phosphorothioate linkage
  modified_base 1..20: mod_base = OTHER; note = 2'-O-(2-methoxyethyl) ribonucleotide
  modified_base 1: mod_base = OTHER; note = 5-methyl cytidine
  modified_base 3..5: mod_base = OTHER; note = 5-methyl cytidine
  modified_base 7: mod_base = OTHER; note = 5-methyl cytidine
  modified_base 9..10: mod_base = OTHER; note = 5-methyl cytidine
  modified_base 20: mod_base = OTHER; note = 5-methyl cytidine
ctccctctccatataaagac

SEQ ID NO: 4892 - RNA, 20 nt, synthetic construct
  source 1..20: mol_type = other RNA
  modified_base 1..20: mod_base = OTHER; note = Phosphorothioate linkage
  modified_base 1..20: mod_base = OTHER; note = 2'-O-(2-methoxyethyl) ribonucleotide
  modified_base 4: mod_base = OTHER; note = 5-methyl cytidine
  modified_base 6: mod_base = OTHER; note = 5-methyl cytidine
  modified_base 12: mod_base = OTHER; note = 5-methyl cytidine
  modified_base 14..15: mod_base = OTHER; note = 5-methyl cytidine
  modified_base 20: mod_base = OTHER; note = 5-methyl cytidine
tatctctgtgtctccaaatc

SEQ ID NO: 4893 - RNA, 20 nt, synthetic construct
  source 1..20: mol_type = other RNA
  modified_base 1..20: mod_base = OTHER; note = Phosphorothioate linkage
  modified_base 1..20: mod_base = OTHER; note = 2'-O-(2-methoxyethyl) ribonucleotide
  modified_base 5..6: mod_base = OTHER; note = 5-methyl cytidine
  modified_base 12: mod_base = OTHER; note = 5-methyl cytidine
  modified_base 14: mod_base = OTHER; note = 5-methyl cytidine
  modified_base 20: mod_base = OTHER; note = 5-methyl cytidine
gtatcctgtatctctgtgtc

SEQ ID NO: 4894 - RNA, 20 nt, synthetic construct
  source 1..20: mol_type = other RNA
  modified_base 1..20: mod_base = OTHER; note = Phosphorothioate linkage
  modified_base 1..20: mod_base = OTHER; note = 2'-O-(2-methoxyethyl) ribonucleotide
  modified_base 7: mod_base = OTHER; note = 5-methyl cytidine
  modified_base 9: mod_base = OTHER; note = 5-methyl cytidine
  modified_base 15..16: mod_base = OTHER; note = 5-methyl cytidine
gtgtgtctctgtatcctgta

SEQ ID NO: 4895 - RNA, 20 nt, synthetic construct
  source 1..20: mol_type = other RNA
  modified_base 1..20: mod_base = OTHER; note = Phosphorothioate linkage
  modified_base 1..20: mod_base = OTHER; note = 2'-O-(2-methoxyethyl) ribonucleotide
  modified_base 5: mod_base = OTHER; note = 5-methyl cytidine
  modified_base 9: mod_base = OTHER; note = 5-methyl cytidine
  modified_base 12..13: mod_base = OTHER; note = 5-methyl cytidine
  modified_base 16: mod_base = OTHER; note = 5-methyl cytidine
gtagctggcttccttctgtg

SEQ ID NO: 4896 - RNA, 20 nt, synthetic construct
  source 1..20: mol_type = other RNA
  modified_base 1..20: mod_base = OTHER; note = Phosphorothioate linkage
  modified_base 1..20: mod_base = OTHER; note = 2'-O-(2-methoxyethyl) ribonucleotide
  modified_base 1: mod_base = OTHER; note = 5-methyl cytidine
  modified_base 4: mod_base = OTHER; note = 5-methyl cytidine
  modified_base 11: mod_base = OTHER; note = 5-methyl cytidine
  modified_base 15: mod_base = OTHER; note = 5-methyl cytidine
  modified_base 18..19: mod_base = OTHER; note = 5-methyl cytidine
cttcatgtagctggcttcct

SEQ ID NO: 4897 - RNA, 20 nt, synthetic construct
  source 1..20: mol_type = other RNA
  modified_base 1..20: mod_base = OTHER; note = Phosphorothioate linkage
  modified_base 1..20: mod_base = OTHER; note = 2'-O-(2-methoxyethyl) ribonucleotide
  modified_base 1: mod_base = OTHER; note = 5-methyl cytidine
  modified_base 3..4: mod_base = OTHER; note = 5-methyl cytidine
  modified_base 7: mod_base = OTHER; note = 5-methyl cytidine
  modified_base 10: mod_base = OTHER; note = 5-methyl cytidine
  modified_base 17: mod_base = OTHER; note = 5-methyl cytidine
ctccatcttcatgtagctgg

SEQ ID NO: 4898 - RNA, 20 nt, synthetic construct
  source 1..20: mol_type = other RNA
  modified_base 1..20: mod_base = OTHER; note = Phosphorothioate linkage
  modified_base 1..20: mod_base = OTHER; note = 2'-O-(2-methoxyethyl) ribonucleotide
  modified_base 2: mod_base = OTHER; note = 5-methyl cytidine
  modified_base 5..6: mod_base = OTHER; note = 5-methyl cytidine
  modified_base 9: mod_base = OTHER; note = 5-methyl cytidine
  modified_base 16: mod_base = OTHER; note = 5-methyl cytidine
  modified_base 19..20: mod_base = OTHER; note = 5-methyl cytidine
gcatccgtctaatttctgcc

SEQ ID NO: 4899 - RNA, 20 nt, synthetic construct
  source 1..20: mol_type = other RNA
  modified_base 1..20: mod_base = OTHER; note = Phosphorothioate linkage
  modified_base 1..20: mod_base = OTHER; note = 2'-O-(2-methoxyethyl) ribonucleotide
  modified_base 1: mod_base = OTHER; note = 5-methyl cytidine
  modified_base 8: mod_base = OTHER; note = 5-methyl cytidine
  modified_base 11: mod_base = OTHER; note = 5-methyl cytidine
  modified_base 14..15: mod_base = OTHER; note = 5-methyl cytidine
  modified_base 18: mod_base = OTHER; note = 5-methyl cytidine
cttataactgcatccgtcta

SEQ ID NO: 4900 - RNA, 20 nt, synthetic construct
  source 1..20: mol_type = other RNA
  modified_base 1..20: mod_base = OTHER; note = Phosphorothioate linkage
  modified_base 1..20: mod_base = OTHER; note = 2'-O-(2-methoxyethyl) ribonucleotide
  modified_base 2: mod_base = OTHER; note = 5-methyl cytidine
  modified_base 8: mod_base = OTHER; note = 5-methyl cytidine
  modified_base 16..17: mod_base = OTHER; note = 5-methyl cytidine
  modified_base 20: mod_base = OTHER; note = 5-methyl cytidine
gctgtagcagggaatccttc

SEQ ID NO: 4901 - RNA, 20 nt, synthetic construct
  source 1..20: mol_type = other RNA
  modified_base 1..20: mod_base = OTHER; note = Phosphorothioate linkage
  modified_base 1..20: mod_base = OTHER; note = 2'-O-(2-methoxyethyl) ribonucleotide
  modified_base 2..3: mod_base = OTHER; note = 5-methyl cytidine
  modified_base 5: mod_base = OTHER; note = 5-methyl cytidine
  modified_base 7: mod_base = OTHER; note = 5-methyl cytidine
  modified_base 9: mod_base = OTHER; note = 5-methyl cytidine
  modified_base 11: mod_base = OTHER; note = 5-methyl cytidine
  modified_base 19: mod_base = OTHER; note = 5-methyl cytidine
gccacgctctctttgatgct

SEQ ID NO: 4902 - DNA, 16 bp, synthetic construct
  source 1..16: mol_type = other DNA
  modified_base 1..16: mod_base = OTHER; note = Phosphorothioate linkage
  modified_base 1..3: mod_base = OTHER; note = Locked nucleic acid
  misc_feature 1..3: note = RNA
  misc_feature 4..13: note = DNA
  misc_feature 14..16: note = RNA
  modified_base 14..16: mod_base = OTHER; note = Locked nucleic acid
  modified_base 7: mod_base = OTHER; note = 5-methyl cytidine
  modified_base 9: mod_base = OTHER; note = 5-methyl cytidine
ggaagacacaaagtga

SEQ ID NO: 4903 - DNA, 16 bp, synthetic construct
  source 1..16: mol_type = other DNA
  modified_base 1..16: mod_base = OTHER; note = Phosphorothioate linkage
  modified_base 1..3: mod_base = OTHER; note = Locked nucleic acid
  misc_feature 1..3: note = RNA
  misc_feature 4..13: note = DNA
  misc_feature 14..16: note = RNA
  modified_base 14..16: mod_base = OTHER; note = Locked nucleic acid
  modified_base 2..4: mod_base = OTHER; note = 5-methyl cytidine
  modified_base 8: mod_base = OTHER; note = 5-methyl cytidine
  modified_base 15: mod_base = OTHER; note = 5-methyl cytidine
tcccgtgcagaaaaca

SEQ ID NO: 4904 - DNA, 20 bp, synthetic construct
  source 1..20: mol_type = other DNA
  modified_base 1..20: mod_base = OTHER; note = Phosphorothioate linkage
  modified_base 1..5: mod_base = OTHER; note = 2'-O-(2-methoxyethyl) ribonucleotide
  misc_feature 1..5: note = RNA
  misc_feature 6..7: note = DNA
  modified_base 8: mod_base = OTHER; note = 2'-O-(2-methoxyethyl) ribonucleotide
  misc_feature 8: note = RNA
  misc_feature 9..10: note = DNA
  modified_base 11: mod_base = OTHER; note = 2'-O-(2-methoxyethyl) ribonucleotide
  misc_feature 11: note = RNA
  misc_feature 12..13: note = DNA
  modified_base 14: mod_base = OTHER; note = 2'-O-(2-methoxyethyl) ribonucleotide
  misc_feature 14: note = RNA
  misc_feature 15: note = DNA
  misc_feature 16..20: note = RNA
  modified_base 16..20: mod_base = OTHER; note = 2'-O-(2-methoxyethyl) ribonucleotide
  modified_base 20: mod_base = OTHER; note = 5-methyl cytidine
tataaggtgggttaagggtc

SEQ ID NO: 4905 - DNA, 20 bp, synthetic construct
  source 1..20: mol_type = other DNA
  modified_base 1..20: mod_base = OTHER; note = Phosphorothioate linkage
  modified_base 1..2: mod_base = OTHER; note = 2'-O-(2-methoxyethyl) ribonucleotide
  modified_base 3: mod_base = OTHER; note = Locked nucleic acid
  modified_base 4..5: mod_base = OTHER; note = 2'-O-(2-methoxyethyl) ribonucleotide
  misc_feature 1..5: note = RNA
  misc_feature 6..15: note = DNA
  misc_feature 16..20: note = RNA
  modified_base 16..17: mod_base = OTHER; note = 2'-O-(2-methoxyethyl) ribonucleotide
  modified_base 18: mod_base = OTHER; note = Locked nucleic acid
  modified_base 19..20: mod_base = OTHER; note = 2'-O-(2-methoxyethyl) ribonucleotide
  modified_base 20: mod_base = OTHER; note = 5-methyl cytidine
tataaggtgggttaagggtc

SEQ ID NO: 4906 - DNA, 20 bp, synthetic construct
  source 1..20: mol_type = other DNA
  modified_base 1..20: mod_base = OTHER; note = Phosphorothioate linkage
  modified_base 1..2: mod_base = OTHER; note = 2'-O-(2-methoxyethyl) ribonucleotide
  modified_base 3: mod_base = OTHER; note = Locked nucleic acid
  modified_base 4: mod_base = OTHER; note = 2'-O-(2-methoxyethyl) ribonucleotide
  modified_base 5: mod_base = OTHER; note = Locked nucleic acid
  misc_feature 1..5: note = RNA
  misc_feature 6..15: note = DNA
  misc_feature 16..20: note = RNA
  modified_base 16..20: mod_base = OTHER; note = 2'-O-(2-methoxyethyl) ribonucleotide
  modified_base 20: mod_base = OTHER; note = 5-methyl cytidine
tataaggtgggttaagggtc

SEQ ID NO: 4907 - DNA, 20 bp, synthetic construct
  source 1..20: mol_type = other DNA
  modified_base 1..20: mod_base = OTHER; note = Phosphorothioate linkage
  modified_base 1: mod_base = OTHER; note = 2'-O-(2-methoxyethyl) ribonucleotide
  modified_base 2: mod_base = OTHER; note = Locked nucleic acid
  modified_base 3: mod_base = OTHER; note = 2'-O-(2-methoxyethyl) ribonucleotide
  modified_base 4: mod_base = OTHER; note = Locked nucleic acid
  modified_base 5: mod_base = OTHER; note = 2'-O-(2-methoxyethyl) ribonucleotide
  misc_feature 1..5: note = RNA
  misc_feature 6..15: note = DNA
  misc_feature 16..20: note = RNA
  modified_base 16: mod_base = OTHER; note = 2'-O-(2-methoxyethyl) ribonucleotide
  modified_base 17: mod_base = OTHER; note = Locked nucleic acid
  modified_base 18: mod_base = OTHER; note = 2'-O-(2-methoxyethyl) ribonucleotide
  modified_base 19: mod_base = OTHER; note = Locked nucleic acid
  modified_base 20: mod_base = OTHER; note = 2'-O-(2-methoxyethyl) ribonucleotide
  modified_base 20: mod_base = OTHER; note = 5-methyl cytidine
tataaggtgggttaagggtc

SEQ ID NO: 4908 - DNA, 20 bp, synthetic construct
  source 1..20: mol_type = other DNA
  modified_base 1..20: mod_base = OTHER; note = Phosphorothioate linkage
  modified_base 1: mod_base = OTHER; note = 2'-O-(2-methoxyethyl) ribonucleotide
  modified_base 2: mod_base = OTHER; note = Locked nucleic acid
  modified_base 3: mod_base = OTHER; note = 2'-O-(2-methoxyethyl) ribonucleotide
  modified_base 4: mod_base = OTHER; note = Locked nucleic acid
  modified_base 5: mod_base = OTHER; note = 2'-O-(2-methoxyethyl) ribonucleotide
  misc_feature 1..5: note = RNA
  misc_feature 6..7: note = DNA
  misc_feature 8: note = RNA
  modified_base 8: mod_base = OTHER; note = 2'-O-(2-methoxyethyl) ribonucleotide
  misc_feature 9..10: note = DNA
  misc_feature 11: note = RNA
  modified_base 11: mod_base = OTHER; note = 2'-O-(2-methoxyethyl) ribonucleotide
  misc_feature 12..13: note = DNA
  misc_feature 14: note = RNA
  modified_base 14: mod_base = OTHER; note = 2'-O-(2-methoxyethyl) ribonucleotide
  misc_feature 15: note = DNA
  modified_base 16: mod_base = OTHER; note = 2'-O-(2-methoxyethyl) ribonucleotide
  modified_base 17: mod_base = OTHER; note = Locked nucleic acid
  modified_base 18: mod_base = OTHER; note = 2'-O-(2-methoxyethyl) ribonucleotide
  modified_base 19: mod_base = OTHER; note = Locked nucleic acid
  modified_base 20: mod_base = OTHER; note = 2'-O-(2-methoxyethyl) ribonucleotide
  modified_base 20: mod_base = OTHER; note = 5-methyl cytidine
tataaggtgggttaagggtc

SEQ ID NO: 4909 - DNA, 20 bp, synthetic construct
  source 1..20: mol_type = other DNA
  modified_base 1..20: mod_base = OTHER; note = Phosphorothioate linkage
  modified_base 1: mod_base = OTHER; note = Locked nucleic acid
  modified_base 2: mod_base = OTHER; note = 2'-O-(2-methoxyethyl) ribonucleotide
  modified_base 3: mod_base = OTHER; note = Locked nucleic acid
  modified_base 4..5: mod_base = OTHER; note = 2'-O-(2-methoxyethyl) ribonucleotide
  misc_feature 1..5: note = RNA
  misc_feature 6..15: note = DNA
  misc_feature 16..20: note = RNA
  modified_base 16..17: mod_base = OTHER; note = 2'-O-(2-methoxyethyl) ribonucleotide
  modified_base 18: mod_base = OTHER; note = Locked nucleic acid
  modified_base 19: mod_base = OTHER; note = 2'-O-(2-methoxyethyl) ribonucleotide
  modified_base 20: mod_base = OTHER; note = Locked nucleic acid
  modified_base 20: mod_base = OTHER; note = 2'-O-(2-methoxyethyl) ribonucleotide
  modified_base 20: mod_base = OTHER; note = 5-methyl cytidine
tataaggtgggttaagggtc

SEQ ID NO: 4910 - DNA, 20 bp, synthetic construct
  source 1..20: mol_type = other DNA
  modified_base 1..3: mod_base = OTHER; note = Phosphorothioate linkage
  modified_base 5..16: mod_base = OTHER; note = Phosphorothioate linkage
  modified_base 18..20: mod_base = OTHER; note = Phosphorothioate linkage
  modified_base 1..5: mod_base = OTHER; note = 2'-O-(2-methoxyethyl) ribonucleotide
  misc_feature 1..5: note = RNA
  misc_feature 6..15: note = DNA
  misc_feature 16..20: note = RNA
  modified_base 16..20: mod_base = OTHER; note = 2'-O-(2-methoxyethyl) ribonucleotide
  modified_base 20: mod_base = OTHER; note = 5-methyl cytidine
tataaggtgggttaagggtc

SEQ ID NO: 4911 - DNA, 20 bp, synthetic construct
  source 1..20: mol_type = other DNA
  modified_base 1..2: mod_base = OTHER; note = Phosphorothioate linkage
  modified_base 5..16: mod_base = OTHER; note = Phosphorothioate linkage
  modified_base 19..20: mod_base = OTHER; note = Phosphorothioate linkage
  modified_base 1..5: mod_base = OTHER; note = 2'-O-(2-methoxyethyl) ribonucleotide
  misc_feature 1..5: note = RNA
  misc_feature 6..15: note = DNA
  misc_feature 16..20: note = RNA
  modified_base 16..20: mod_base = OTHER; note = 2'-O-(2-methoxyethyl) ribonucleotide
  modified_base 20: mod_base = OTHER; note = 5-methyl cytidine
tataaggtgggttaagggtc

SEQ ID NO: 4912 - DNA, 22 bp, synthetic construct
  source 1..22: mol_type = other DNA
  modified_base 1..22: mod_base = OTHER; note = Phosphorothioate linkage
  modified_base 1..6: mod_base = OTHER; note = 2'-O-(2-methoxyethyl) ribonucleotide
  misc_feature 1..6: note = RNA
  misc_feature 7..16: note = DNA
  misc_feature 17..22: note = RNA
  modified_base 17..22: mod_base = OTHER; note = 2'-O-(2-methoxyethyl) ribonucleotide
  modified_base 21..22: mod_base = OTHER; note = 5-methyl cytidine
ttataaggtgggttaagggtcc

SEQ ID NO: 4913 - DNA, 16 bp, synthetic construct
  source 1..16: mol_type = other DNA
  modified_base 1..16: mod_base = OTHER; note = Phosphorothioate linkage
  modified_base 1..3: mod_base = OTHER; note = Locked nucleic acid
  misc_feature 1..3: note = RNA
  misc_feature 4..13: note = DNA
  misc_feature 14..16: note = RNA
  modified_base 14..16: mod_base = OTHER; note = Locked nucleic acid
taaggtgggttaaggg

SEQ ID NO: 4914 - DNA, 20 bp, synthetic construct
  source 1..20: mol_type = other DNA
  modified_base 1..20: mod_base = OTHER; note = Phosphorothioate linkage
  modified_base 1..5: mod_base = OTHER; note = 2'-O-(2-methoxyethyl) ribonucleotide
  misc_feature 1..5: note = RNA
  misc_feature 6..15: note = DNA
  misc_feature 16..20: note = RNA
  modified_base 16..20: mod_base = OTHER; note = 2'-O-(2-methoxyethyl) ribonucleotide
  modified_base 12..13: mod_base = OTHER; note = 5-methyl cytidine
  modified_base 15: mod_base = OTHER; note = 5-methyl cytidine
  modified_base 17: mod_base = OTHER; note = 5-methyl cytidine
gggttaagggtccactctaa

SEQ ID NO: 4915 - DNA, 20 bp, synthetic construct
  source 1..20: mol_type = other DNA
  modified_base 1..20: mod_base = OTHER; note = Phosphorothioate linkage
  modified_base 1..5: mod_base = OTHER; note = 2'-O-(2-methoxyethyl) ribonucleotide
  misc_feature 1..5: note = RNA
  misc_feature 6..15: note = DNA
  misc_feature 16..20: note = RNA
  modified_base 16..20: mod_base = OTHER; note = 2'-O-(2-methoxyethyl) ribonucleotide
  modified_base 18..19: mod_base = OTHER; note = 5-methyl cytidine
taaggtgggttaagggtcca

SEQ ID NO: 4916 - DNA, 20 bp, synthetic construct
  source 1..20: mol_type = other DNA
  modified_base 1..20: mod_base = OTHER; note = Phosphorothioate linkage
  modified_base 1..5: mod_base = OTHER; note = 2'-O-(2-methoxyethyl) ribonucleotide
  misc_feature 1..5: note = RNA
  misc_feature 6..15: note = DNA
  misc_feature 16..20: note = RNA
  modified_base 16..20: mod_base = OTHER; note = 2'-O-(2-methoxyethyl) ribonucleotide
ttttataaggtgggttaagg

SEQ ID NO: 4917 - DNA, 20 bp, synthetic construct
  source 1..20: mol_type = other DNA
  modified_base 1..20: mod_base = OTHER; note = Phosphorothioate linkage
  modified_base 1..5: mod_base = OTHER; note = 2'-O-(2-methoxyethyl) ribonucleotide
  misc_feature 1..5: note = RNA
  misc_feature 6..15: note = DNA
  misc_feature 16..20: note = RNA
  modified_base 16..20: mod_base = OTHER; note = 2'-O-(2-methoxyethyl) ribonucleotide
  modified_base 1: mod_base = OTHER; note = 5-methyl cytidine
cagtttttataaggtgggtt

SEQ ID NO: 4918 - DNA, 20 bp, synthetic construct
  source 1..20: mol_type = other DNA
  modified_base 1..20: mod_base = OTHER; note = Phosphorothioate linkage
  modified_base 1: mod_base = OTHER; note = 2'-O-(2-methoxyethyl) ribonucleotide
  modified_base 2: mod_base = OTHER; note = Locked nucleic acid
  modified_base 3: mod_base = OTHER; note = 2'-O-(2-methoxyethyl) ribonucleotide
  modified_base 4: mod_base = OTHER; note = Locked nucleic acid
  modified_base 5: mod_base = OTHER; note = 2'-O-(2-methoxyethyl) ribonucleotide
  misc_feature 1..5: note = RNA
  misc_feature 6..15: note = DNA
  misc_feature 16..20: note = RNA
  modified_base 16: mod_base = OTHER; note = 2'-O-(2-methoxyethyl) ribonucleotide
  modified_base 17: mod_base = OTHER; note = Locked nucleic acid
  modified_base 18: mod_base = OTHER; note = 2'-O-(2-methoxyethyl) ribonucleotide
  modified_base 19: mod_base = OTHER; note = Locked nucleic acid
  modified_base 20: mod_base = OTHER; note = 2'-O-(2-methoxyethyl) ribonucleotide
  modified_base 18..19: mod_base = OTHER; note = 5-methyl cytidine
taaggtgggttaagggtcca

SEQ ID NO: 4919 - DNA, 20 bp, synthetic construct
  source 1..20: mol_type = other DNA
  modified_base 1..20: mod_base = OTHER; note = Phosphorothioate linkage
  modified_base 1..2: mod_base = OTHER; note = 2'-O-(2-methoxyethyl) ribonucleotide
  modified_base 3: mod_base = OTHER; note = Locked nucleic acid
  modified_base 4: mod_base = OTHER; note = 2'-O-(2-methoxyethyl) ribonucleotide
  modified_base 5: mod_base = OTHER; note = Locked nucleic acid
  misc_feature 1..5: note = RNA
  misc_feature 6..15: note = DNA
  misc_feature 16..20: note = RNA
  modified_base 16: mod_base = OTHER; note = Locked nucleic acid
  modified_base 17: mod_base = OTHER; note = 2'-O-(2-methoxyethyl) ribonucleotide
  modified_base 18: mod_base = OTHER; note = Locked nucleic acid
  modified_base 19..20: mod_base = OTHER; note = 2'-O-(2-methoxyethyl) ribonucleotide
  modified_base 20: mod_base = OTHER; note = 5-methyl cytidine
tataaggtgggttaagggtc

What is claimed is:

1. An antisense oligonucleotide (ASO) complementary to at least 8 contiguous nucleotides of a regulatory RNA of human SYNGAP1, wherein the regulatory RNA has a nucleotide sequence selected from the group consisting of SEQ ID NOs: 4, 5, or 6.

2. The ASO of claim 1, wherein the ASO is complementary to a sequence in the regRNA that is no more than 200 nucleotides from the 3′ end of the regRNA.

3. The ASO of claim 1, wherein the ASO is complementary to a sequence in the regRNA that is no more than 200 nucleotides from the 5′ end of the regRNA.

4. The ASO of claims 1-3, wherein the regRNA is not a polyadenylated RNA.

5. The ASO of any one of claims 1-4, wherein the regulatory RNA has a nucleotide sequence of SEQ ID NO: 5, and the ASO comprises a nucleotide sequence selected from the group consisting of SEQ ID NOs: 14-59, 220-250, 261-267, 272-278, 526-528, 542-591, 702-728, 729-735-741, 988-990, and 1007-2961.

6. The ASO of any one of claims 1-4, wherein the regulatory RNA has a nucleotide sequence of SEQ ID NO: 4 or 6, and the ASO comprises a nucleotide sequence selected from the group consisting of SEQ ID NOs: 110-219, 280-525, 529-541, 592-701, 742-987, 991-1003, and 2962-4852.

7. The ASO of any one of claims 1-4 or 6, wherein the ASO comprises the nucleotide sequence of at least 8 contiguous nucleotides of chr6:33419695-33419939.

8. The ASO of any one of claims 1-5, wherein the ASO comprises the nucleotide sequence of at least 8 contiguous nucleotides of chr6:33453987-33454269.

9. The ASO of any one of claims 1-4 or 6, wherein the ASO comprises the nucleotide sequence of at least 8 contiguous nucleotides of chr6:33419674-33419940.

10. The ASO of any one of claims 1-9, wherein the ASO is no more than 50, 40, 30, 25, 20, 18, or 16 nucleotides in length.

11. The ASO of any one of claims 1-10, wherein the ASO comprises a RNA polynucleotide comprising one or more chemical modifications.

12. The ASO of claim 11, wherein at least 3, 4, or 5 nucleotides at the 5′ end and at least 3, 4, or 5 nucleotides at the 3′ end of the ASO comprise ribonucleotides with one or more chemical modifications.

13. The ASO of claim 11 or 12, wherein the one or more chemical modifications comprise a nucleotide sugar modification comprising one or more of 2′-O-C1-4alkyl such as 2′-O-methyl (2′-OMe), 2′-deoxy (2′-H), 2′-OC1-3alkyl-O-C1-3alkyl such as 2′-methoxyethyl (“2′-MOE”), 2′-fluoro (“2′-F”), 2′-amino (“2′-NH2”), 2′-arabinosyl (“2′-arabino”) nucleotide, 2′-F-arabinosyl (“2′-F-arabino”) nucleotide, 2′-locked nucleic acid (“LNA”) nucleotide, 2′-amido bridge nucleic acid (AmNA), 2′-unlocked nucleic acid (“ULNA”) nucleotide, a sugar in L form (“L-sugar”), 4′-thioribosyl nucleotide, constrained ethyl (cET), 2′-fluoro-arabino (FANA), or thiomorpholino.

14. The ASO of any one of claims 11-13, wherein the one or more chemical modifications comprise an internucleotide linkage modification comprising one or more of phosphorothioate (“PS” or (P(S))), phosphoramidate (P(NR1R2) such as dimethylaminophosphoramidate (P(N(CH3)2)), phosphonocarboxylate (P(CH2)nCOOR) such as phosphonoacetate “PACE” (P(CH2COO—)), thiophosphonocarboxylate ((S)P(CH2)nCOOR) such as thiophosphonoacetate “thioPACE” ((S)P(CH2COO—)), alkylphosphonate (P(C1-3alkyl) such as methylphosphonate —P(CH3), boranophosphonate (P(BH3)), or phosphorodithioate (P(S)2).

15. The ASO of any one of claims 11-14, wherein the one or more chemical modifications comprise a nucleobase modification comprising one or more of 2-thiouracil (“2-thioU”), 2-thiocytosine (“2-thioC”), 4-thiouracil (“4-thioU”), 6-thioguanine (“6-thioG”), 2-aminoadenine (“2-aminoA”), 2-aminopurine, pseudouracil, hypoxanthine, 7-deazaguanine, 7-deaza-8-azaguanine, 7-deazaadenine, 7-deaza-8-azaadenine, 5-methylcytosine (“5-methylC”), 5-methyluracil (“5-methylU”), 5-hydroxymethylcytosine, 5-hydroxymethyluracil, 5,6-dehydrouracil, 5-propynylcytosine, 5-propynyluracil, 5-ethynylcytosine, 5-ethynyluracil, 5-allyluracil (“5-allylU”), 5-allylcytosine (“5-allylC”), 5-aminoallyluracil (“5-aminoallylU”), 5-aminoallyl-cytosine (“5-aminoallylC”), an abasic nucleotide, Z base, P base, Unstructured Nucleic Acid (“UNA”), isoguanine (“isoG”), isocytosine (“isoC”) a glycerol nucleic acid (GNA), glycerol nucleic acid (GNA), or thiophosphoramidate morpholinos (TMOs).

16. The ASO of any one of claims 11-15, wherein the one or more chemical modifications comprise 2′-O-methoxyethyl, 5-methyl on cytidine, locked nucleic acid (LNA), phosphodiester (PO) internucleotide bond, or phosphorothioate (PS) internucleotide bond.

17. The ASO of any one of claims 11-16, wherein the ASO does not comprise 10 or more contiguous nucleotides of unmodified DNA.

18. The ASO of claim 17, wherein the ASO does not comprise a deoxyribonucleotide.

19. The ASO of any one of claims 11-18, wherein the ASO does not comprise an unmodified ribonucleotide.

20. The ASO of any one of claims 11-19, wherein the length of the ASO is 5×n+5 nucleotides (n is an integer of 3 or greater), wherein the nucleotides at positions 5×m are ribonucleotides modified by LNA (m is an integer from 1 to n) and the nucleotides at the remaining positions are ribonucleotides modified by 2′-O-methoxyethyl.

21. The ASO of any one of claims 11-19, wherein the length of the ASO is 3×n+2 nucleotides (n is an integer of 6 or greater), wherein the nucleotides at positions 3×m are ribonucleotides modified by LNA (m is an integer from 1 to n) and the nucleotides at the remaining positions are ribonucleotides modified by 2′-O-methoxyethyl.

22. The ASO of any one of claims 11-19, wherein each ribonucleotide of the ASO is modified by 2′-O-methoxyethyl.

23. The ASO of any one of claims 11-19, wherein each nucleotide of the ASO is a ribonucleotide modified by 2′-O-methoxyethyl.

24. The ASO of any one of claims 11-23, wherein the ASO comprises 10 or more contiguous nucleotides of unmodified DNA flanked by at least 3 nucleotides of modified ribonucleotides at each ofthe 5′ end and the 3′ end.

25. The ASO of any one of claims 11-24, wherein each cytidine in the ASO is modified by 5-methyl.

26. The ASO of any one of claims 1-25, wherein the regRNA is an paRNA.

27. A pharmaceutical composition comprising the ASO of any one of claims 1-26 and a pharmaceutically acceptable carrier or excipient carrier.

28. A method of increasing transcription of SYNGAP1 in a human cell, the method comprising contacting the cell with the ASO of any one of claims 1-26 or the pharmaceutical composition of claim 27.

29. The method of claim 28, wherein the cell is a neuron.

30. The method of claim 28 or 29, wherein the ASO increases the amount of the regulatory RNA in the cell.

31. The method of any one of claims 28-30, wherein the ASO increases the stability of the regulatory RNA in the cell.

32. The method of any one of claims 28-31, wherein the method results in increased SYNGAP1 mRNA in the cell.

33. The method of any one of claims 28-32, wherein the method results in increased SYNGAP1 protein in the cell.

34. A method of treating disease or disorder, the method comprising administering to a subject in need thereof an effective amount of the ASO of any one of claims 1-26 or the pharmaceutical composition of claim 27.

35. The method of claim 34, wherein the disease or disorder is a SYNGAP1-related disease or disorder.

36. The method of claim 34 or 37, wherein the SYNGAP1-related disorder is SYNGAPi-related intellectual disability (ID), mental retardation, autosomal dominant 5 (MHRD5), or SYNGAP1-related non-syndromic intellectual disability (NSID).

37. The method of claim 34, wherein the disease or disorder is a central nervous system (CNS) disorder or a peripheral nervous system (PNS) disorder.

38. The method of claim 38, wherein the disease or disorder is an affective disorder (e.g., depression), schizophrenia, Alzheimer's disease, Parkinson's disease, Huntington's disease, an autism spectrum disorder (ASD), (e.g., Asperger's syndrome, autistic disorder, Pervasive Developmental Disorder-Not Otherwise Specified (PDD-NOS)), or a CNS or PNS trauma (e.g., brain or spinal cord ischemia or trauma, stroke, or a neurological deficit associated with surgery or anesthesia)

39. The method of any one of claims 34-38, wherein administration of the ASO increases SYNGAP1 gene expression in the subject relative to a pre-administration baseline level.

40. The method of any one of claims 34-39, wherein the ASO increases the amount of the regulatory RNA in a cell of the subject.

41. The method of any one of claims 34-40, wherein the ASO increases the stability of the regulatory RNA in a cell of the subject.

42. The method of any one of claims 34-41, wherein administration of the ASO increases SYNGAP1 gene expression in a cell of the subject relative to a pre-administration baseline level.

43. The method of claim 40-42, wherein the cell is a neuron.
